United States Patent Application Publication US 2006/0240418 A1 - sequence listing, part 3

SEQ ID NO: 9906 - DNA, 666 bp, Canis familiaris
  misc_feature (1)..(666): n = a or c or g or t
acattcccactctcctgagtgcagactgggtagaaaagacatttctgccaggttggnnngccacttactcactgggaaagaaattcctnnagagaaaccttcattactgctccaggacttctgagacataagggaatcctggcagccagtgatcagaggccggnaagctgacattccatcctgggagctcaggtgacctcttcagaaggaagagatgctgttttggccctggagggctgaaggccaagcccagggtttgactccttgacccagaggattgtgtgacttcctcttctcactcttgtcctactagcctgttccatcctcttcctctgctctcagatcctgtaggtccatggaggggcaagcaataagcaacctgccccccaccctagcccccagacttctccctaataattgaagggaagagcatttttttcttgttaagcaccaggttaaggctggggcagtccctcctcacctgctcattgcttgggcggaaacaccttcccatagttcatctgtgtggctcatccctttcccaccaagagcccatcttactgcctcctgtcggcacctggaggcttcctccaaggccacaaggtcttgcctagcctgaggacttaagtccttgtgcagctttagtttcatcgccagaacaannnn

SEQ ID NO: 9907 - DNA, 486 bp, Canis familiaris
  misc_feature (1)..(486): n = a or c or g or t
cattccctgtgaagatgaggaggaagannaggaagaggaagagacgtatgatgatattgatggctttgatgccccaaactccggttcccagtgcagacctatcatcttgcctgggagtatggggccaaaagagcccacaaaggagacagaagatgatatttatgaagtcttaccagatgaagagcatgatctggaagaggatcagaatggcactccacataaaggagtggactataccaattattaccagggcctatgggattgccatggtgaccagccagacgaactgtccttccaacggggtgacctcatccgcattctgagcaaggagtataacatgtatggctggtgggtaggagaactgaacagcctcattgggattgttccaaaggagtatctcaccactgcctttgaaatggaagaaatatgaagcccaggcttttcacagagaaggtgagagacaaggaaaccttcggaggaggaagt

SEQ ID NO: 9908 - DNA, 593 bp, Canis familiaris
  misc_feature (1)..(593): n = a or c or g or t
ggtggtcatggacntnnnnnnagactgnnnntgtctccccacctgacacagctgtggcccagccttgtggccagcatgaggnggnctgcctgccccagcacagagtccatgggcacagctggtgagnntctgcatcccaggagaccacaaactctttccaccctagtggctatgcagtacaggccatttatacccaccttctcttccccctctttccctccctctaactgcatgaaatgtggactgtgtactggggatgggcgtggtagggaccgagactgctgactggaattattctagaaccaaaataaagctggggcaggaaggagggagcttctggggagccttgctcagccccaaatcactttcatctcttctgcaggaatcacggacttgggtctctgtgtgggttgctctgagtggattgccctgcttctgggtacccagaagaaaaggaagccgctgtctggctggggaaaccatcacatggaccaatgccatcagacagcttgggaagctctaagaaggggccctgagccaggcctggtggagaggatggcagtaggagaaaccatggagggctccctgatggt

SEQ ID NO: 9909 - DNA, 602 bp, Canis familiaris
  misc_feature (1)..(602): n = a or c or g or t
agggggcctnnaccctgcttcctacatgtggtccccacatgnnagcgnntcagcagtnctagagcacagcacacaagtgacaaaggtgcctgggggccagtggggctcagccagcactgctcccagatccacccttacctggggccacgtcagctggccacactgtcaggctgggcatcagtctacactgcagcacctgagggctttgatccacctggtaaaagcagtggcttcccacctgccatctcctgcttagcctggcacctcctatttccattctcttatgatctccaaagtgtggcgacctcactctaaatatgccgtctcttttcatcatcctaactcctctctggcaagtaggactcacggccagaccaagctcactgaaagtcctgtgtaagacaaaccagggatcacgttaagtggcacctcagaagcccccattgtgtgcaagcctagtctgtgtcttagcagtgctttagaaggcatgtacgcgtgtataaatgtaccatagatatttatgtatgttactatagcactatgtggagggcaacataacaggtggacagggtctgtcagaggaaatgaaagaatctttctgg

SEQ ID NO: 9910 - DNA, 409 bp, Canis familiaris
  misc_feature (1)..(409): n = a or c or g or t
cnacgcatgtatgaatgaaaccaggatcgannagctcaaggnnnagcccctgatnnngctaattgagaaggtgagttcctnnagcagcctttcctggatctcctctggctgccaccccagctgtcaggtgtcactgggtctgcctacctcacaccccagccacctcacccagctggattatagaaccggtcagggctgagtgtgtctgagtgtgtgtatgcgtgtgtgtgtttgcgctcctgtgcatgcacgtgtctctatgggtgggaatatctgtatatgggggtgtatgcgtcaacatcgttgtggatgtgcacatgtatgtgcatcactgtgcatgtgcatgtggaatggggccatatttacagagaaaatgtttctggggacgcctgggtggctcagtggttga

SEQ ID NO: 9911 - DNA, 597 bp, Canis familiaris
  misc_feature (1)..(597): n = a or c or g or t
gagaacgnaaagaatctnnaggtggtgctgcactacaaggccagccacacggatttaggtgatctaacagaaatggaggaggggaaggaaaaaatcaaggacatgaagcaggtcctctggaatgaagtggtttctgtgaggtcagagcctccagaggtgaagtccacagaagatgaggacggggtttatgaagagtcccaaaaacaggagggcaaggaggaagacagcaaagatgagagcactgatgatgcttgtcccgaagcttcagaggaaagcaaccccctcaagctttctgagagcaaaaagaacttgtttgggatgtggaagcctatggtgttcttggctattgcggctgtggctctgtatgtgttacccaacatgcgaccgcaggagtcagagttctgcctcatggagtgatggcagacctgggccagccgagggagcagatccccagtggccactatcctcagctttgggcaggacacactgcgccagagcccccacctcacccatgtgtcccatgtgtccccatctccttagcctcagtcacccaggctggaaaggttatggggagctgctggctgccatctcctgcct

SEQ ID NO: 9912 - DNA, 678 bp, Canis familiaris
  misc_feature (1)..(678): n = a or c or g or t
tccatnnacttctatcttctttttttccntttgaaaagatactagnacagtaaagagtggtataagtaagcngtcntgtactaagtcctctcccctttccttgtctgcttctcatgtgtccttccaaggagccctcttaaaattctgcatttcctacccttagtcaaattgtgttacctttttaataactctccccactgcatattctccatcttgtgaattggcagttcaaaatcctgaaaatgtaattgacatgcaagtattatttctgggagatgtgcttccccctagtctctggttgcccagggttattctgcataattgagacttactatgcttcagagagtttgaataaacactggccaggattactgggagttaaagaattcaggtatgggaaagcatctgcatagagcacttgaacctcctgtgtacctgttggaaaaaatatataaagagtgtattaaacccagccaaggttattagtctgattgtttgaagtaccatttttccctccttctttttcccactttccaatgtactcaagaaaactgaaaaattgtaatggatcaatttaaaatattttatttcttgaaagccttttttgcctgttgtaatgtgcaggacccttctcctttgatggagagacaggtagttacctgaatctaggttgaaaag

SEQ ID NO: 9913 - DNA, 565 bp, Canis familiaris
  misc_feature (1)..(565): n = a or c or g or t
atctctcccatcaccttgtgacagggcccatgttcccactcatgtcaacacttgaaagcattttccaaaaatactggaaaagtatttttcctttttgccagttaacaacttttatgggtatgatttgcctttcctcgattatggtatggttgagcatcttttcatggccactggccnnnnnnatggagtcaggtgtgaattgtctcctacccttgcctgaacttctatcacgttaatcatcttttacttatttatgtgtgggttttacctccttttaaaaaagggataaaacataactgatttaaacaattcaaataaaaccaaaggtatagaggcaaaaggaattccccctcccacccccagttctccannnnnnnnccagggtccacgtcttcctgagcacacaggtatggcacatgtgaccacagtgtttttaggaggcctgaaaatctggaaatattttaattgtaatttcttttacaatcagaaaaaaacacaataataatgagctcagcctagatcatatttatctttatatcaaggcaatcataaaacatatttttta

SEQ ID NO: 9914 - DNA, 621 bp, Canis familiaris
  misc_feature (1)..(621): n = a or c or g or t
cnnncgagcggaaacgnnnggggtactgctacatcgannagcccctgcagaaacccgtgccctgctggctctacctgggggatctgaagatgtggtccacccgcctgcgacctgagatgcaggtngaaacctgccatgtcccgtgcaaaacatcaacgctggatttcatcacctttgacaactttgagatcagcgaggagtcagaatccgtgtggctcacctgccccctgggatccatctacaggcccatcctctgggaagccaacgacatgcccctgacgtggcagggccagctctccaaccaggacttaaacaccgttctggaacccgccaacggcggcaggcagctgcaggtcttccagccagccatctacaagtgcttcgtgcagcaggagctcatggctcggttcaaccccaggccctttcccgacgtgccggaggccctcagggaggaggaggcaggccggcagcagggggcgagggaggcctcgaaggggaaggccgggcctgtcctcaaggggctgaagttgacgctgctggtgggcatagtcctggggctgctggggctgctgctcaagttcttccaccattcccagggcaaaagaagtgaccaggtgctgc

SEQ ID NO: 9915 - DNA, 536 bp, Canis familiaris
  misc_feature (1)..(536): n = a or c or g or t
cttcttctttccttttccattcccagacatccagctcctnntnnagtgcctcttccntgcagggcagggacccttgtgaaagagggaaggtgggctggctgggctgcgcgtccctaggtgttgcagggctcagggttctgttcctgctggagtttggatgtgaatccgggaaaatgtacctgtggaccttcctgattcattaccccctttccctctttctgagaggcagagaaataatatttttaaaaggtattttgttttagttttaaatggcaaaacacaagctgcatttttatttattatgcacaaaaaaggtaaatctgtttttacaaaaaaatctggagttggaaactctgggaaaacctattgaaatatacacatgcttctctctctgtaatgtgcaatatgctttgcaactatagatgatattttatgtttaatctgtaaataagaagtgtatttaaattaagagggagctttttgtaaaaggaccaaatgttcttttataaatgtactaagaaatatcttgttctttg

SEQ ID NO: 9916 - DNA, 135 bp, Canis familiaris
  misc_feature (1)..(135): n = a or c or g or t
antgtgacctggccgcctgctgctcccctacctggnggggccganagcaaaggaccctgnnnnnnnnnnnnnnnggnnnnnnnnnnnnnntgccccnnnngggccaggctagcgggagggcgggacggccgcggn

SEQ ID NO: 9917 - DNA, 620 bp, Canis familiaris
  misc_feature (1)..(620): n = a or c or g or t
tttctgtgtnggatcccaaaaccgnagagtttnntaggaatgaagtcaggagaacacgtgannagaaactgcgcttttcatatgatgcatcatcatgcttacgaattttctgtgagaattccgtgcnnaagaaagtcgctctccacnntcctgtggtggtgcacggccacctccgcaatgctgctgctgtcaccacagcacggacgagctggcctgcgcctgctccgaactgcccgccggacccctgccttcccgccctccttccctggtcagaccctccccgtggggcagcccaggcccgtgaaggcctcctgtgcctccagccgccccccagccgcccgccaggtgctgccctggcagggcccacaccttggcttccgactctgcctggggcctcctggtttaatattctcctgtgtacacctgacctttggagcccctgcttctgaggcaccttctttgacctcacgttctcctcccaaagccctgtgttcttcccctggtgacgccgtgctggggtcggcctgctgtgacaggtcctgtgtccacgcctcattccacacactagccgtgggctggccncgggcaaggattatgcctcttcacctgtacgttaccat

SEQ ID NO: 9918 - DNA, 667 bp, Canis familiaris
  misc_feature (1)..(667): n = a or c or g or t
tgctnngtcatctgcagggtagtaacccagtgatgttttttgcagnagtgcaatatgtngagaatcctgggtgtgancaatatggaataaagaagaaagcagaaagagagcaaatgaaaattacaacttgtatatttatttattttttacattttgctttgacttttaaatttaggaagtacgtttttagccaagaaacatttaagctcctgtgtcagtctcagtactctcactgcgccttcctaaccctgtagctcttgatgctgggaaagcagattttttaaaaaaaaataaaatatttaatcttattaagtgtttatttaaaacgtgtaatgctttggaaataatgggtaacagataactaaaggatatgtttataaagtgagcatgttggttccatttataaatatatgtatgatttataagcttttttaaaaaacaaagctcaaattgttggtatttttctaaaatgtgcacagctgtattttacatgaaaggctctttctaatgggttgttatactgtactctacattttggacagcacatgaagtctgccaatgtacttaataaaacatgaccttgtttatttaaagtttcttgctgtgaaaaagaactccctacctgtgagttcctttatttataatccttgaaaccaaaatgtataat

SEQ ID NO: 9919 - DNA, 176 bp, Canis familiaris
  misc_feature (1)..(176): n = a or c or g or t
taaagacanacaggaatntgttatttnnnatttgtcngcagcnnnngattnnnnnaatttgcnactttaaatacnnnanttctttgaagacnnnctctgagnnnntccnnngagcatgtgtgtgtnnncatgcacgcactgagcaggtttgtacatttgtnnngnggcccagatga

SEQ ID NO: 9920 - DNA, 687 bp, Canis familiaris
  misc_feature (1)..(687): n = a or c or g or t
ggcatgaannntgcttcaactgcgccaaatgcaatcactctttggtnnaaaagccttttgctgccaaggatgagcgnctgctgtgctcggagtgttattctaatgagtgctcctccaagtgcttccactgcaagaagaccatcatgcctggttcccgcaaaatggaatttaagggaaactactggcatgaaacctgctttgtgtgtgagcattgccgacagccaataggaactaaacctttgatttcaaaagataatggcaattattgtgtgccatgttttgagaaggagtttgcgcactactgcagcttttgtaagaaggtgataacttcaggtgggataacgtttcatgaccagccatggcataaagagtgttttctgtgcagtggctgtagaaaagagctgtgtgaagaggagtttatgtccagagatgattacccattctgtttggactgctacaaccacctttatgccaaaaagtgtgcagcctgcaacaaacccatcactggtctcagaggtgccaagtttatctgctttcaagaccgccagtggcacagcgaatgctttaactgtgggaagtgctcagtctccttggtgggggaaggcttcctgacccagaacaaggaaatcttctgccgcaagtgtggttctggattggacaccgacatctagaggaagacgatctttc

SEQ ID NO: 9921 - DNA, 622 bp, Canis familiaris
  misc_feature (1)..(622): n = a or c or g or t
ggtcnctctggcagaggtaccnntgctagacgaggtnnctgannagccactgccactggcaggcaaaggctgtgccaaccttctcaattttgatgagctgcctgagccgccagctaccttctgtgacccagaggaggaaacagaaggggagcccctagctgcctcccaggtcccaactctgccctccgctctagaggagctggatcaggagccagagctggagccagaaccagagccccacctgctgaccaatggcgagaccacccagaaggaggggactcaggccagtgaggggtacttcagccaatcacaggaggaggagttcgcccaatcggaagagctgtgcgcaaaggccccgcctcctatgttctacaacaaacctccagaaatcgacatcacctgctgggatgcagacccagtaccagaagaggaggagggcttcgagggcggtgattagcggtggtgcctgccctcaggctgcccttgccaaggccgcccacctgtgtcggcctctggccagacggcccgccgcgcctgcactcgcagcagctccgcctggcatccattccggattccggccctggcccaggacttggccgcttccctacccacagggcccaac

SEQ ID NO: 9922 - DNA, 515 bp, Canis familiaris
  misc_feature (1)..(515): n = a or c or g or t
tnctcacntagctgctgccagcatgggcannngctgccacacccacgagcctccttcttccttcctccttccgggctgccacgcagccaggtgagnnngcctgtcgaggcccctcagccagcccgcccaccgggggtcgccaggagggcccaccctgtcctgtcggcgcaccgccacataggagtgcatccgctttcctcctgggaacggggcgaagacctctgcctcagtggtgggctgggcttggtttgtattctcatgcttttggaaggtgcgaggggagggaagggccgggatgtggaacctgtccgtgcccgtcagagccggtggcgacagcggccctctccaggcccggagccaaggcagcagcaccgcggcccccgagccagaagctgcaggcccaccagtgctggcgtcagatgttgagggtgttgtgtaaacagttggctgttttcgtgattcaagaacgttcaggattaaaagcagacacaaaattgtgctacttgaagttgaat

SEQ ID NO: 9923 - DNA, 649 bp, Canis familiaris
  misc_feature (1)..(649): n = a or c or g or t
tatcatgctggnctgcancagaagatgtcngcantactctcattgctaaaaatgttgcgtagcacagaactgcactaggattaatttgtttacaagaagaaattaaaactacatttggtttttttacatacagcagctctatcgaataacatgcatctgaattttaagttgcaaaggtatctgaaaagttaatttttcatgtgcatcttttgttgaatgttttggttcaagaaagaatgttcaaagcttttttcaagacttcagttcttaatgtaactgtacccttctgcatggagaatcataaccaacatggctgcagtagacttcttagcggtatccagcaccacttgcagagggctgctttatcatattaattgtacttgggtgtaggactctagtgttcttgggtgtattgcatgggctgcattatctacagcattgtacaataacaactagaagaggcagtatacttcaccgatgcttgtctggtaatatcacttctgtgttataatggaaggtttttgtgatgtatgaaacttgtgtttttttatatataaatgagtatagttagattagtattgtggtaatgcctgttttcatctgtaaatagttacgtatgtacacgaggcactacttctgatttattgca

SEQ ID NO: 9924 - DNA, 666 bp, Canis familiaris
  misc_feature (1)..(666): n = a or c or g or t
aaaannagaaaagaagagaaaagaaaagaaggaaaagaaaagaaaagnnnnnngaaaagaaaagaaaaaaaagaaaagaaaagaaaagaaaagagaaaagaaaaaaaagccagcactantattccaatcatttgagcaagacagcagctgaacttgagaagannaagaaaatgctgagggtcaccagtgattcactagatttctggttcattttacagtcttctggaaagttaacttataaattgattttggttttaaatacaggaggaagaggttatgccattcacactacagtcacagtataatttaaatagtgtaaatgactaacagggtcccgaggcatctttcctctggactatgcataaagctaccttggttgttcactggttcagatccagtgtcacgagataggggatggtttgagttgccccagagttgccccagatgctgtatggagacagcatgtgcttctacacaccttatctggtctacacctcagccctcgtgcattaatttgataaagaatgttcctgagcagaggcacctgggtggctcagtggttgagcatctgccttcagtttaggtcacgatcctggggtcctgggatcgagtcccacattgggctccctgcaggaagcctgcttctccctctgctnnnnnnctgcc

SEQ ID NO: 9925 - DNA, 62 bp, Canis familiaris
acagcaatggcagtaatagcagcaatattcagtgaccacttcctgttcactttttttttttt

SEQ ID NO: 9926 - DNA, 230 bp, Canis familiaris
  misc_feature (1)..(221): n = a or c or g or t
tctcccactcagatcatgntactggtgagctcagtggctnnagnggcannntaccagtaacatgatctgagtgggagagatcanctaagctaacaatnngggtcnacgttgtgtgggggtccaagactccagaggaagatgctttttatcaatggaggggtgacgnnnnnnnnnnaagcangaaaaaaagttaacttgtattatgtatttttactacacttttcttaaaa

SEQ ID NO: 9927 - DNA, 604 bp, Canis familiaris
  misc_feature (1)..(604): n = a or c or g or t
tcctanngctagaatatnnacatcactcnnngcagaaattgaaactaaatttaaaccctttaattatnnnnttatttgaaagagtttagntgagatgttcacatagtatgtattatattaancgtatcacctttaagttattaaattcagactatttataacttattgtcataggacttgcctcttggtttaggatatttgagtaatcatcagatatttaaagtaaactttgacttaaaaatactgttaatgaaggttccctggcactttcttatttttaaattgttcttaatgggtaataggtaattcagtaccatgtgtagtgacattaactcctagataaacagtgaatattttttttggtgagtggtccagagctttaagctacttacttctcttgtagtttgcagccctcttccagatactctgactactctttcggtaatgctaattgtatgtcaaattttgactacagcagtgggcgacggatgaagataagttggtcgataggtctctagcaccatacatcccaattttctatttattgtgtgtactcactttcagtaatgtatttcaaactgatatttttgtaaacaaatcaatg

SEQ ID NO: 9928 - DNA, 391 bp, Canis familiaris
  misc_feature (1)..(391): n = a or c or g or t
tgagactttggatgccaaagagattcaaanngnncttgagggaaagaaattggaagtgagatgataattcttaaaatggatgcattgctggttttactgcaagaatatataagtagcatttcagtagtctccttttgcaatgcttttctctcattcttgacttgatatcactcaagggtgtgaaacactttgtctcttttgtcatgtttagtctagttttggttagtctcatgatgacacctattgcaagttatcaactcatagcaaatatgttaaagaaaataaagaactgttaggattgaaaatagcttgttagagaaatgtcagtcagttattcagttgaaaataagtaatgatttcatggttggttcctctactagatgtgaataaa

SEQ ID NO: 9929 - DNA, 168 bp, Canis familiaris
  misc_feature (1)..(168): n = a or c or g or t
aagggtccagttttcttcactgtaannnccatgtatttttctttcccttttaaagaaaaactctttataaaatagtgtgcctttctcaacactgcagttgtcaacagtccacagcttatgaatagggctacttttaagaacagctgtgccattttctgaggacctgac

SEQ ID NO: 9930 - DNA, 642 bp, Canis familiaris
  misc_feature (1)..(642): n = a or c or g or t
agaattcactcataccactctggctgctgatgtcatgagacctcgaaggaacgatcctccnnnnnncgtcctaacacaggacaatatgacagtggatgatatagaaaacatgattaatgaaaccagctacaatggctttcctgtcataatgtcaaaggaatctcaaagattagtgggatttgccctcagaagagacctgacgattgcaatagaaagtgccagaaaaaaacaagaaggtattgtgggcagttctcgtgtgtgttttgcacagcacaccccgtctcttccagcagaaagtccacggccactgaagcttcggagcattcttgacatgagcccttttacagtgacagatcacacaccgatggagatcgtggtggatattttccgaaagctgggtctgaggcagtgccttgtaactcacaatgggattgtcttggggatcatcacaaagaagaacatattagagcatctcgagcaagtaaagcagcacgtcgaacccttggcgcctccttggcattataacaaaaaaagatatcctccgtcatatggcccagacggcaaaccaagaccccgcttcaataatgttcaactgaatcctatagatgagagagaggaaacagaagaggaagttcatttgtt

SEQ ID NO: 9931 - DNA, 516 bp, Canis familiaris
  misc_feature (1)..(516): n = a or c or g or t
tgaggtggcagagatgcggcagatgctgcagtcagagcatnnttttgtgaatggggttgagaagctggtgccagactctctattcatacctttcaaagaacacagccagagcctgctggaggagatgttcctgcctgtgtcggaagcacacagaaagcctctcaagcgcagcagcagtgagacagtgctaagcagcttggcagggggggacatcgtgaggggtcatgaggagacctgcattcggagggccaaggctgtgaagcagagaggcatctcccttctgcacgaagtggacactcagtatagcgccctgaaggtaaagtatgaggagctgctgaggaagtgccagcaggaagaggactccctgtcccataaggccgtgcagacctccagggcactggccaaagagacccagcctgagctcgacaccagcagttgggagccagcttctgctaccccagagcctgtcagttcccccaccaccannncacctccagaatataaagcgctttttaa

SEQ ID NO: 9932 - DNA, 483 bp, Canis familiaris
tgagtctctttcttctgtttctttagtatcatctggtacaaatagtaaaaacttatacctgtttccttaatagacactctagaattttgttgcattggctattaatcccatttcaaattcagattttaaattcttctccccttcactaaactctctggaggcctcctgagcaccactgggaagcaccgggatctgcagcacccctctgtccctgtgcctcggagggaccataggccactgtgacgatggtctgcttagcacttctgtatttattataagaatgattgtaatgaagacataaactataaatatgagaaattataaataaaatgtttttcacatcagactgaatttttggaaaggttaaaactttactgttggcaaagcactttgtagttcccagtctatggtgacaggtaactgatcagaacaaatgtcacttggctatagtgttttacacctggctcaaggggatccctgggt

SEQ ID NO: 9933 - DNA, 563 bp, Canis familiaris
  misc_feature (1)..(563): n = a or c or g or t
ttaaggtggttatnccacccctgtgnntgctttgccagctgcagctcgattccctggctgactgtattttacactacttaatagaaacacaaacttggaaattgtgccactggcccggctggagcaatgttaagtgtatatgctaatgcctcagttcagagaggaagcagctaggtgtactttgccgtaagcaaagcaaatacctggatttacagaagtggaagtggttgttcacaaaagaattccccatggaattctttgagataccaagctctcctagtatgtttgtggttatttcatttacacagaacttttcaggaactcctgtgttgtttaaagcaagatatatctatactgatgtctcagtgaatcagtctgtttaagcacttatcagggcttccacacaattatttattttgccctagttgatctcgttgtttgctgccattggcatgaaacagccagctgtggctgttaacagttgttctttcattcaattataacttgtaaaccagtgattcccaatctttttcaagttaagacnnnnnaccattgcttatttg

SEQ ID NO: 9934 - DNA, 597 bp, Canis familiaris
  misc_feature (1)..(597): n = a or c or g or t
ttcactcaacaggtatcggttgatgccttgtgnntctgcctnnatttcttcctgttcagctctaagtagtagtaagatctccttgcgatacagagcagtgtcatcgcctcctcaccctctctaacgtcccctccattaacctggctgaggcaccccacagtggcactagtattatacccagtgtcagaaatgcagggctttctggctctaacatcagttgccttcagtaacaaggctgctggagcaaggctggcagcctcagggcttccgtacttccttcaccaccagagtccctcaggggaggccatccttctcccctatcctgctctctcctccccactcccaatagtatttggtacccaggctggttcttgggctaggtagtagggaccaggtttgtttcctccctatcagttctaacacaatcaactctgataccagtgttagtggaagacctgattctcctagtagacccaccaggtcctatcactatcttatcaccacactgcttccaggtatgggacctgccgagtgtggaaatacctgatgagggaagggaagggaagagacgaggagnnnctctggagatcctggcct

SEQ ID NO: 9935 - DNA, 599 bp, Canis familiaris
  misc_feature (1)..(599): n = a or c or g or t
ttcccctgccttgctctctnggttcaggnnnctaagnnagtnggctccaggtagcacggccntcactctgctagtngaagaaggggcatnnaggggacacctggccagctcggtcggtagagcccgtgactcttgatctcggggttgagtaagccccacattgggtgtagccattacctaataacaaaatctttttaaaaaaacaaaaacagtcacctgggtggtgctgtcggttgagcgtccaattctgggttttggctcagatcctgatctccaggtcatgagatcaagccccgtgctgggctccatgttcagcagagtgtgcttgggatcctccctctctgtctctcacaaaataaataaatctaaaatccttaaaagtcggggtgggcatggggatcttcctaagagagtttagtaagagactctcaaatcctgcaaaaagccagccagggcagactaacctgtgtctatcatggaacggtctaatcacattttaggaggtagacatgaccgtctaaaggaaaccaagagtgaggcgctgtgctccgtaccataaaccccttgttcctggtggcagagctggtgttcttccagtg

SEQ ID NO: 9936 - DNA, 469 bp, Canis familiaris
  misc_feature (1)..(469): n = a or c or g or t
ggnacaagataatcaataaggaagtaccaggctcaatgatatnnagcagattgacttacaacgttccaccaacagcaaaaaacacattgttctcacatgcacaaggaacattctccaatatagattttatattaggccacaaacaagttttaataaatttgattgaaatcgtatcaggcatcttttcctacgacagtgccatgaaaggaagtcaggtacaagtacaaaactagagaaattatgaacatgtgaaaaataaagaacgtgcagtagcattactcctaatagccaggatctggaaatgacttgtgtctcttgtcagatgagtagataatatggtggatatataaaatatacgttggctataattaacaatactatattcgctatctgaaaattgctaaaaaattcttattaattcttataacacacaccaaattgtaaactnnnggtaatnnnnctaagtaaa

SEQ ID NO: 9937 - DNA, 489 bp, Canis familiaris
  misc_feature (1)..(489): n = a or c or g or t
ccttctnnagncctgaaggccccctgcccttgactcccgcgccccagccgcccnnntaaaaacgcttggtgtccctgcagcgcccggtttccggcgncgccctcgcgaaccccctctctggggcaggtcgccctccctgctcgccctgcagcctcccggccccccggaaacacggctgcgcccccttgaggccgagggcgaaatactggttgatccacctccccttctccccgcccccacccggactttttttagcggttcgcccccacgacctggtgttcgttcgctttcattgcgttatgtagagctgggaaaggggaaagcgtccttgtgcagtgttgtcgtttgcctccctccgccctccgtataaaggcccgcaacaaagaaggaagagctaaatcacaaaactgatgaaaaggtcatgaaacgctggttttagtcagtaaaacccaagaggattttgnnncaggtcatgatcccnnngttgtg

SEQ ID NO: 9938 - DNA, 555 bp, Canis familiaris
  misc_feature (1)..(555): n = a or c or g or t
aggtgctgncctcccatctcttcntatgcnncaaaatccgatacttnnacttgtcctacaatgacattcggttcatcccaccnnaggtcngagtcctacagagtttacagtatttttccatcacgtgtaacaaagtnnagagccttccagatgaactctatttctgcaagaaacttaaaaccctgaagattgggaaaaacagcctatcggtactctcaccgaaaattggaaacttattatttctttcctatttagacgtgaagggcaatcactttgaaatcctccctcccgaactgggcgactgccgggccctgaagcgagccgggctcgtggtggaggatgctctgtttgaaactctgccttccgacgtccgggagcaaatgaaagcagaataactgattttttgctttaaagcttgaccgaaacgcgcttctaccaaatacagtataaataactaggtagtcttgatgcctttcctattttattttatttttttcctctttcacacaaaagaaaatgtacacaagattgagtaaggagtgtgtattttttaat

SEQ ID NO: 9939 - DNA, 490 bp, Canis familiaris
cccagagtgttcccacgtccaccaacgacagctgccatggttttgtttgcacataaggtcacgcagacattctggggtcctggggttaggaccctacgacttgtggtggttgcacccacagttcaccccctgccactaggtggtcctgctgtgctgtccttcccagttctcagatttcaggccccagcgcctgggcacaatagcctggaaagtctgcagccctgatggtgacctgggagtgacagctggtaggggagcctcaggcagcagggacggtcctgatgttctggatcgtgagcaactaagaccagcaaccaggcaggtgttctgtgtcatttgtatgtccggtcctgtcccccaccaggtacttcatcgtcacatgcagataccacgcccccagaccccgcgaaagagctaaaaggtcctgtagttaagctccgtgcctgtgtagatgcaccccttgcctaggagcaagaagtgcgagaacacc

SEQ ID NO: 9940 - DNA, 145 bp, Canis familiaris
  misc_feature (1)..(145): n = a or c or g or t
ctggacacagggctcccctatgaactgcaggcagtgactgagtcccctcacaatccacgttattcacctttgccctgattgtcagtgccctgaacccatgtgggccaagtaccagcccatcttgtccnnnnnnncagagcaaata

SEQ ID NO: 9941 - DNA, 474 bp, Canis familiaris
  misc_feature (1)..(474): n = a or c or g or t
gcgatccctcgccccagctgcgctnngccctccctgggctgccaaataagctnnnnnnnagctggaangaacctcggctgctgccacagacttggccgccacgcctctatctcggtgnnagctgtcacccagcccgtctgttcagatcccgctgccacgtgtgacctnnggtaggaggcccttggggggcagcggggcccagaagtggggagggacgttggggcgcaaagtctcaagaggaggggtgcgtgtctgtagtcactcacccggcggctgagcttggcctgaaaccccacgctccggccgcatccccagtattcnnnnnntgtgttttcctgctctttctccgtattttatttttttatttcttgggggaggggcccatttcaggagcggctcggggctgaggaggtcagtctctggctcccccggtgagaagccggccatggcctcctccctgcccttgtgctggtc

SEQ ID NO: 9942 - DNA, 597 bp, Canis familiaris
  misc_feature (1)..(597): n = a or c or g or t
gaaaagcttaccaaaaatatacttgacgtncagcctttccaagaaccataatcntgtccatagtatttacctcatttttgtctgttttgctgtgggtaagctttgtaagataaataatgtctatacatgtttcaactgtttaatgagtaatcagcaaaatctgccaaggagtccctctggaaccatataaagattctggctctgaataaaccagaagtgtttgcccacatggcaaatgatccatgttaaatgtaaatccttttttagtgtttaacgtctgttctcataagcaggtgtattatgatgaaacatgtaccaattctgtcatcactgtgatctttaaaaaatctgcatttaatagtctaattaaggaactaagttgatttttttatttgccgtaaaccaagcaaaattaaatgcaataatttctgagacttatggcaaatgaattggaggtatggataaatctttcaaatattttttactgctcttcagtaaagaaaggcacaagaaaatacccaactctcttgtgttatctcagtgttgctactgcagaaaagtgacaatgcttacttgtgtaaatttatggcttactgt

SEQ ID NO: 9943 - DNA, 624 bp, Canis familiaris
  misc_feature (1)..(624): n = a or c or g or t
cntgaaaatacacccatttcactataaataaaagtgaactgtatgtttttagatctggtgacataggactatgaaaaagaggggaaaaggaatgatatgagctctggtcagtgctgttnnagcactccactccctctgcagcctgggtccctgaacagagtcctgtgcacgtgcccaggctgcaccccgacaccttcggtctcagggtagggcctcacaagtgtaatgtgtaagatacccctggtaattccaatatgtaatgctggtacagtaaggatcactgatctggatcctagtcctggctgtttgcatttgggtctctgttctcatctataaaggaagggaccagtgagggtctctcggggtctcgggagagtgtatttggtcagatgaccttgaatgaatagactactgtgttgaaagagccttatcacactgcctcagatgcataaagcatatgcacacaagctaggtaatggatgttctgacctccgaagtcttgcaaagagccatttgcctaagggagaggcgatttttgtaggtgccgtgaaggaacactattactgttggtaagccttcgggggtgggggtgtgagtgggaatgataaacagatatttttgttt

SEQ ID NO: 9944 - DNA, 575 bp, Canis familiaris
tccagttgacacataacaagcttcttcaagaatacaataattcattgaaaacaatcgaggaactgaaaaggaaagagtcagaaaaagtggataaggtgattctgcaagaactaagtgaaaaactggaactggcagagaaggccctggcttccaagcagcttcagatggatgagatgaagcagaccatcaccaagcaggaggaggacctggaaaccatgaccgttcttagggctcagatggaggtttactgttctgactttcatgctgaaagagcagcaagagagaagatacatgaagaaaaggaacagctggcgctgcagctggcaatcctgctgaaagagaataatgcttttgaagatggaggcagtaggcagtctttgatggagatgcagagccgtcatggggcaagaacaagtgaccctgaccagcaggcctacctcgtccagagaggaactgaggatagaagctggcagcggcagcagcagcgtaatattccgattcattcctgccccaaatgtggagaagttctacccgatatagacacactccagatccacgttatggactgcatcatt

SEQ ID NO: 9945 - DNA, 140 bp, Canis familiaris
  misc_feature (1)..(140): n = a or c or g or t
annnaataagatgaatcactttaaaaccaagatgtcattgttcttacagaacatgttaagacatcaaactgtgttgagctcaactgtactgttaaataacgaggctgctattgtgcatctgtaacagctgggaattttgc

SEQ ID NO: 9946 - DNA, 559 bp, Canis familiaris
  misc_feature (1)..(559): n = a or c or g or t
tgtcctcatcttcctcaccaccnnnnaagactgtngnnncagccccagcagcagctgttgacaccagtgctgttaagagatttgtacatgtttatgttccgctcaaaaaaaagtttcaccatcttcgcctgtcgagctttctctgtgcagctgatgaagttgggctcacagtccgtatttcatcatatgtctggctccatctttatttgggaatggaaaagtcagtctgggagttggaaatgaatttctagatcctagtaaaactgtccactgagcagcccactgcaaggggtccccgctgcctaagcgcatcgccagggtagctgcccagccagcgcttgctgccacttggacctgcttccagaggctctgctggcattaggcctcaccttctgggtttggctatttttttaatgtcatcaacattatgtagttattttcttaataggtgttgaatgaaacattgtgtaaattgtcacttattcaaaggcatctgggaatgacaggagcaggctgccgtcatgctgtcttacggagactgatcatgtgttctgtgcgt

SEQ ID NO: 9947 - DNA, 519 bp, Canis familiaris
  misc_feature (1)..(519): n = a or c or g or t
gannaagaaaagctgttgagcangaagatcatgaagtactgggctanctttgctcgaaatgggaaccctaatggcaaggatctgcccctctggcctgtgttcgaccaggaagagcagtacntgcagctgaacacgcagcctgcagtgagtcgggccctgaagtctcacaggcttcagttctggatgaagaccctaccccagaagatgcaggagctgatggaggcggagaagaagcacacagagctgtagctccctgcgtctgggggtgaggggccagggggctgggcttgaggggatatgccggatatgcccccccacccactgaggagccaggggcttttccctcagtcacacagtctttcattcattctgccagccagccagccagccagcattcattaagaacctactgcattggggtccccgggtggctcagcggtttagcgccgccttcagcccagggcgtgatcctggagtcccggatcaggtcccacatggggctcctgcatggaccctgct

SEQ ID NO: 9948 - DNA, 325 bp, Canis familiaris
  misc_feature (1)..(325): n = a or c or g or t
tgtctctccctctctctctcatgaataaatnaaaaaaaaaaaaaatcnnaaaaaaaaaaaaaacatggctggcaaacaatnnngtgcccaataaatgnncacaattatcattagtcaggnagcagggagttgtcanncaaagaaggcttccatgannnaatctggcttgagtgttactcgttttaaattaatgaccacaccatctcaagtgaacattantnnnnncgagctnnnnngccccagtggtttagtggnnnnnnnnnnnnntcnnnnnagggtgtgatcctnnnacnngggatcgagtcccnnnnnnggctcctctctc

SEQ ID NO: 9949 - DNA, 649 bp, Canis familiaris
  misc_feature (1)..(649): n = a or c or g or t
cagccaaggaacgttcccggtggcgttgggacccggacggtnnncncgaaagggncnctacagtgtcttgccaactgacttgacaacttcatttcaactaatttttgtctcattacttcttttctctttttctcccttagaagcacaaacagcgacattgggcctgtggccaccgggagactgggttgccccccgggaggtgcgggagggagcggtcctcgctgtagacagaggggcagcgtgggtgcagatagggctagtgagagccagagcgttccggtcacggttgaaatgtggttttatttctgtgcagctctagctagaccccgaagtgtctgaaaaggagaaaacttactcttcattagattcatttaaaacttttctcgagaaagaaaagtcctgagggtatagaaactttccgcgcttaaatatgtcacgttaaggtgcctcacaatgtttcgtttacagggggccaaagaccacagatccacgctgattgctaattattcagattgtaaatagctcgttcaagaacttagggtgagacaaaagaaacaggaaggaacaaaaggcccacaataatgaaaaggatattgtgaagagaaaggctgggtggaattatgatgcaggtcacatcctgtgcctgtat

SEQ ID NO: 9950 - DNA, 549 bp, Canis familiaris
  misc_feature (1)..(549): n = a or c or g or t
cctgttgatttgctgaaaaaannnatgaagaatgtgatatctgcagtacagtnannntanntactgtaatgtgcctaaatagtaaggctgccttctcaatgtaaccctctgtgcttaaaaaatttcattttgtgtgctttgtattcactacacaagaataagcacttttgtttttaaatgcaggtatatactgcagttcgctgataaaagctgagaaaaaaatttaagttaagatttgataaatgtgcatgtgccatgatcaattatatacgaaaaggcagtgttctttgtatttatttttttttctttttagtggcaaacgaaacgtaagcatattgtttcagtcacatttgcattgttgtagtgtatggcttgtttcttgtatcttaaaaaatgttgctcaataaaataaatcatgcaactattttatgttcagtacaccttcagcattggttgaacatgtgtttctatttaatgccacattgaggtgaaaaatggtttgttgacagttttaaaaaataattctagtgttttagggagctgctctaa

SEQ ID NO: 9951 - DNA, 451 bp, Canis familiaris
  misc_feature (1)..(451): n = a or c or g or t
aaanctgccctggnntgacttgtcagtnnaagatagnnnnnaagtctccaaatcagtcaaaaacagattnnnatattttatgtattcagattttcttctagctgatttaatggagtgagaaacagaatagcttcnnngtcttccccagcaatttgcatgctgagaaggttcagctgtcagaaataaagcaaagccttcacacagaacacctccaagcgacatgtgtgaacacacatgccacacgtagctcagcttccctgcctcnnnagcgtggtgatccttccagaaagggagaggaacgaaatcagagaccaaaaatgcatacagaattcttttatttaacttaaaccatgtagtactttaactactagaaaaaagcagagtaagagaaactaaagttgccttagcttcagccatnnnnnaatagataaagttnnnnnnnttttcccat

SEQ ID NO: 9952 - DNA, 585 bp, Canis familiaris
  misc_feature (1)..(585): n = a or c or g or t
tngtagcacgggnnnctccaagctttcaagcaannagcagagtttaaaattatatcagatttgttcattttgtttattactttatagtaagtttgaataaannntaggggccattatcacttaagtaatacttnatctaggcttttcaaaattatacctcaatgaagttgtttgtatacataaaggatatatgtgtacactgactttttctccccatgtacttgttttattttcttctgttttgtttttcacagcaactggaaattatttaatgtatttcattttagcctgtctttatataataaagagttgatcagtttgtaaatatgtgatttaaaccatggttgacttacaaatgtcactgcaattttttagaaaacataatccctaatatatgttaaacacctactcagaaagcccaggtgagccagtgagcatgtgctttgtgtaaagatggaagaagtagggcaatccatcatttctttcaggtggacaatttactgtcctaataaggaagggagcacaatggaaatacacctgaactgttttattgcagtaatttttcatatctgaaattgtattatt

SEQ ID NO: 9953 - DNA, 641 bp, Canis familiaris
  misc_feature (1)..(641): n = a or c or g or t
tcacctgcttcctggcagtngacacccagctgctgctgggcaacaagcagctgtcnctgagcccggaggagtacgtgtttgctgcgctgaanntgtacacnnacatcatcaannnctttctgtacatcctcaccatcatcggccgcgccaaggagtagctcacgctgggggccccgcttgggtggcctggctggcctggaccctgcccctggtgtggcagtgccatcgtacctccccgctctcatccctgggcacagcctgggactgagggcccctctccaaccctcctgtgtgtacactgcagatacttctgttcggacccgccgtggccagcatggccccttctcgccctccggccctgccaaagggcagtggggcccggtttccatgccaccccatgcccactcactgttgcatgagccctgtctgccagcccaccctagggtctgggggcaacaccaggtcccaggggagaggggccgagccaagaggtgagggtgcacgtgtcccctcccgttcctgccccccagcctggcatagagtacccagtccccccctcccctcccctgccctggagtgctgccctcattcctgtgctgagccccgagggcagagaggatgagcctatttcaggggaggag

SEQ ID NO: 9954 - DNA, 565 bp, Canis familiaris
  misc_feature (1)..(565): n = a or c or g or t
tgnnaaaaaaatcatctattttgatnnagcatttgataatgataannnnnntcacanntctnnntagtgcacaaaatgaatgaggnnngggctaggtagaaaaaaggtcaatgctgtttttattttcttttagaatcattaccttttaccagcttttaaccatctgatatctatagttagacacactataatacttaacatagttaagttcggcacttgtctcattttattgtaaagatctgcttccattttcccacaggcagtctctctccttcctcacagtcccactgtgcaggtgctattgttgctcttaccaatattttctgaaatgttttaagtgaaatttcttttctagcctgcactttgatgtcatgtgttcccctttgtctttcaaaatccaaggttccccctccccctttccttgaccccaggaagctttctgggaccccttaccccttggctctttggactttgtatactttaaataatttaactacccttaattacttaaaaaaaaaaaagctttatgattttcataacttattgctgattttaatgggttgtt

SEQ ID NO: 9955 - DNA, 477 bp, Canis familiaris
  misc_feature (1)..(477): n = a or c or g or t
agggggaangtcccgcaagaagaaacccaagnnagcgcagcaggggccggagcacaggaccgagggccctctccttccangcgcggcccgttccaggtcacgtggggcacggagaggccctcctgagcaaggtacagcccagcagccggaggggaccagcctccagcaggacccagaagtgcccccggcccccgtgaaggggaggaggaggcggcaaccagcagcctcgggccaccgaagaccccaaaggatcaaggccaacacccggtccttggaggaggggatgtcagcctcttagcaggagggcctccccgctggcgtccacctcctgcccctgcggagccctggggcccgagtagctggctgcaagcaggccctagctgctgggggccaggggcccctggccgtgtagctcttccctgccccactatgatgtttttgagtgtacccccttctccattttttaagcccatgcaa

SEQ ID NO: 9956 - DNA, 587 bp, Canis familiaris
  misc_feature (1)..(587): n = a or c or g or t
gagcacgtnataggtattcaggatnngtagaatataannatgacganctcacgtaaatgaacccacaaaagggattgatgcaaagaatcatttgagactctgtgagttatgagaatgcagaaaacttagaatcagtcactaaacctgcaggtgacttttgcaaaacgtatgtttttttaagggcttcttttaaaatgtttgccttttttccttaccttgagagtattgggttggatttggaaactgtacctactgatggatgtgtgggactttttagaattcatccatctgcatcctttcccttcttttgaggcgacctaggtaattttgcgtacaatgcgtatgaaccacccccaaatgaaaatggtacgagcctctgtgttgtctcttgcataaggacttaaagattgtttttagtttttattatggaaactttcaaacatacctgaacgtagagaaacgtacggcgaccctcatgtatctatcacccgcaacgaccatcaaatcatagcttgttgattgttttgaaacaaatataannnnnntatcatttctttatatttccgtttgtgtcactaaaaggtgag

SEQ ID NO: 9957 - DNA, 542 bp, Canis familiaris
  misc_feature (1)..(542): n = a or c or g or t
cgtaggcttcctgctgctcctgctctgggtcattctctgctgggnctgccattcccgctctgcnnacatcgactctctttcggaatccagtcccaactccagccctggcccctgtcctgagaaggcacccccgccccagaagcccagccatgaaggcagctacctgctgcagccctgaaggcccctcgcctcgcctggagtctggggcctaagtctgccccacccagagcctgggatcaggatcccagggtctagccagtctggggtccagaacccagagtccagcctgtctggagctggacctagcagcccagagtctagccagtctggctccactaggggctccagtggcccttagtagacaggcctggggtgggggttcatgagttggtgctagggccagggccatctcgactctgctccataccgagggccagggactgggtccacctctccctaggccaattgcctccaggcccttgaggttggggaagcaaactgnnnnnccatggcaataatgggagggtgtccaggctgggccc

SEQ ID NO: 9958 - DNA, 676 bp, Canis familiaris
  misc_feature (1)..(676): n = a or c or g or t
ctggaccatcaaaaacaacgagtgtgtgaagactctgnacgcccatgaggacaannnnngggggctgcactgtagccggctggacgatcgtgccctcacgggtgctagtgactcctgcgtcatcctctggaaggatgtgaccgaggaggagcagtctgaagagcaggccaggcgggaggaggaggtggtcaagcagcaggaactagacaacctactctatgagaaacggtacctgcgggccctgggcttggccatctccctggaccggccccacactgtgctgactgtcatccaggccatccggagggaccctgaggcatgcaagaagctaggagccacggtgttgcggctgcggcgagatcagaaagaggccctgctgcgcttctgtgtcacttggaacaccaactccaggcactgccacgaagcgcaggctgtgctgggggtgctcctgcggcacgaggccccagaagagctcctggcgtacccaggcgtgcaggcctcactggaggctctactgccctacacggagcggcattttcagcggctcagccggaccctgcaggcagccaccttcctggacttcctgtggcacaacatgaagctgcccacccttcctacagctccctctgtggctccctcagnnnnnngaaacatgcagaaagatgttttctctcnn

SEQ ID NO: 9959 - DNA, 419 bp, Canis familiaris
  misc_feature (1)..(419): n = a or c or g or t
tatatgtctcattttcttggttgaaggaggctattgcttcatcccccaccccaactgagccagtggccatcagtgtggttccattctggaggccttcatgccgctcatggttactgccctccctcacccctgcccctcagttcaacctgatgtgaaggctctgattatgttggtccttcattgatctgcccgcacagcagagccaactttctctccatgttgctgctgcttttgctgcttattggtttctccttattgtctttctaaatgactctatttccttgtttttaatttttgttaggttatgtttctaatttttattccaggtgttttttataaacttcacttgccagaaaaaaagggaaaaacccaatcaaatcttgctgtattatcacatttttataannnnnatcattctc

SEQ ID NO: 9960 - DNA, 587 bp, Canis familiaris
  misc_feature (1)..(587): n = a or c or g or t
gcatcatgagcgtggttgaccccaaccacagtggnntcgtgaccttccaagccttcattgatttcatgtcaaggnagaccaccgacacagaccagcctctcacccccaccccctgcgagcccccaccttgctttgtccagacacgtgtatctcgcagattttctaaggaccacaaaacaaaaacaaaaaaaaaacaaacaaacaaaaaaaccataaaacaacaaaaacaaaaaatacacaaaaaaatctataaaaaaaggaattaaaaactttcagagaattactatttactttattaacttacggatttattatataaatatatattcacctagcaacatatcctcgccgcctcttgctcataatgaagacatagctgatttgctgccctcctgccagccccttactgatttctctctgttgtctgtcgttgggcatgggtctctggggaccctcctgaggtggagggtgggctgctggcctggctgcctgttagttgatgggttttgctcccttcccctcccccccctttttttgagtttattctgattgattattttttttctcggtttctggataaaccaccc

SEQ ID NO: 9961 - DNA, 476 bp, Canis familiaris
  misc_feature (1)..(476): n = a or c or g or t
ctgatnncaaagactganngccacaaggctccgaaggctcccccgttcttggcatggtgtgtctgttctccaggcgctctcctgggtctctggcaatctgctctctgctaattggtgcagatgggagtaggaaggtgaacagagcacacgggggagnaagcagattctcccggaagactgaatgacatgatagatctaaaatacctcatccatggatacaaggcctgagctcagcagctgacaagtacttaaataaaaaaaaaaaatatgtgtttgatgaataaacaaatgagggaaggaaagccacaattggttaacttcctggagtctggggacctgacttctagtccagcctctgctgtcaagcctatgagaccacccaaaggtcacttatcatttctggttctgagtttcctctcttgtctcagggagagtggcctcaaattgtctctataatgccttctaatcggggattg

SEQ ID NO: 9962 - DNA, 283 bp, Canis familiaris
  misc_feature (1)..(283): n = a or c or g or t
ccccaatctgacaggagtctcctccccttttggaaatcctctatccccgaggggatgggatgcccaggcctgagggtcttggccacctgctttgttttcannnccctgggaagatgattagcagtggcctgagcagcagcctggcctcctggcactaagcttggccccagccccactcccatcttctggggcacctggtggctcagcggttgagcatctgccttcagctcaggtcgtgatatggggtcctgggatcaagtcccgcatcagactccctgcgggg

SEQ ID NO: 9963 - DNA, 228 bp, Canis familiaris
  misc_feature (1)..(228): n = a or c or g or t
tcctgggactgagccgggggcagcccgggcacagccgtccagtacagggcggccgtgcgtttgcacaannaggcatatggttttgcacatgttggaggagcctctggtctcctttgccctgattggggttcagcctcttgggcaacgtgatacgctctcccagggggtcaagaaagaccagactccctccctcttcacgtggtnncactgttgtatagaaactgctga

SEQ ID NO: 9964 - DNA, 467 bp, Canis familiaris
  misc_feature (1)..(467): n = a or c or g or t
atgannctgtnnnnatttncnnnntcactgaaagaattcnannnnnnatcatagtcctgacnnnnnnnnncgagnnngncagaacnnagtctnnncattcacatatnacttacatgttaccagtnnnnatgtgatataaatnnatcctgcagaagattccctgatgttcaaagtcaagctacttctatacaattgggaaaatgcccactatgttagaccttgggctagactttagggatctgtgttcctgcaccaaaccccacagattgccactgctctatttatcaaatgggcaaaaattcagtatctatcaaaaacataaatgcacatatcctatgcccagtaacccctagtctagaaatttatcctatagaaatactagcacaagtgtgtcaagaaatatggcaaggatgtttctagtaacactttttctaattaaaaaaaaacaaattgggggattcctgggt

SEQ ID NO: 9965 - DNA, 40 bp, Canis familiaris
  misc_feature (1)..(40): n = a or c or g or t
tnncctctgggggcngganncgagcctttttgttgcttcg

SEQ ID NO: 9966 - DNA, 551 bp, Canis familiaris
  misc_feature (1)..(551): n = a or c or g or t
cnagccnaagttccatctgnagatttccagagcttcntagaaaccaatgaggganngaagaactnnnngcaaaacttnnngctgtatnnaattgcatttgtagaaaatgtccctcccactcaagaacacacagagaagttggcagaaaggatcagcttgatcagagaaaccanctatgggangatgtggtatttcacttcagacttctccagaggtgacaccgcatacaccaagctggctttggatcggcacactgacactacctattttcaagagccctgtggcattcaagtgtttcactgtcttaagcatgaaggaacaggtgggaggacactgctggtnnatggattctatgcannggaacaggtacttcaaaaggcanctgaggaatttgaactcctcaccaaagtaccattgaagcatgaatatattgaaaatgttggagaatgtcacaaccacatgattggggttgggccagtcttaaatatctacccatggaataaagaactctatttgatcagaagcctttgcctagggcagccctggtgacc

SEQ ID NO: 9967 - DNA, 276 bp, Canis familiaris
  misc_feature (1)..(276): n = a or c or g or t
ccctccaccagcagatgctgctgaagcaccaaatttcccaagaccttctccctagctnnncacaatgtctagggaaaccagacggtggttttaacattatgcctctttccacccccatgcactttttctgacacgttttcaggtctgaatagtggctgctcaagtccattaactcaatggtgtgaagccaccattattgaacttccccgtggtggtttcaagatgcccctcttccccctaattccttgcactttattctcctgggtggttccgaac

SEQ ID NO: 9968 - DNA, 655 bp, Canis familiaris
  misc_feature (1)..(655): n = a or c or g or t
ggtgtgcagaaagaagtttccagagtctaatctcaagctggtgaactccactctgatttggaccaagaaacccagccaggaattaacagagcnctctcccggggagcagagcaaagtcagtaaggcctccctggtggaacctaacaaggtcaaagagttattccctaaggagcagataaaggtcaaagagaacatcccttctggctcagtngagacccagaccatagccaccaaagaccccaagtgtgaggaagatccggacttaataaagcagtcaaagatagccctggactactgtggggaatcctgggggtctctctgcaaattcttcatcaccatggtccaggggaattcatgctaatgagatcaaaagagaacaaagttctttaggaggttttatgtcaaagcccttcagtatgtggtacagcgctctgaataagatgaacatttgtgctatgagagtgcagtggaatatttaaatgggttttataacttttgtttttgtgttttggagtttactttatattcatttccttaaattttattttcagaggttgtnnnctcagcatatgtttctacggctgacaaagctatgtgtatataannnnnnatacattctttgatctaaatgannnngaatgatgattccagtgca

SEQ ID NO: 9969 - DNA, 297 bp, Canis familiaris
  misc_feature (1)..(297): n = a or c or g or t
tctatacccaacatganngcccagacccacaacctnnagtctcatgctccactgacccaaccaggtgcccccagtttattttttgcagttctgtgggtatgttcacaaagttgtacagtcanntcagccaattttagaacattttcatcaccccaacaagaaaacctacaccttttataaaagcagccattcccccatttctctccaatgatcntagccttaggcaaccattaatctttctatggatttgcccattctcaacatttcctataaactgagccatagggatccctgggt

SEQ ID NO: 9970 - DNA, 579 bp, Canis familiaris
  misc_feature (1)..(579): n = a or c or g or t
agatgtacgagagcctgacgcagatcctgggnacgctgccccccgagacgaaggtgttctgtggccacgagcacacgctgggcaacctggagtttgcgcagaaagtnnagccgggcaacgaccacgtgagagctaagctgtcctgggccaagaagagggatgaggacgatatgcccacagtgccgtccaccctgagcgaggagctcctctacaatcccttcctaagggtggcagaagagcctgtgcgcaagttcacggggaaggcggccccagccgaggtcctggaggcactctgcaaggagcgggcaagcttccagcgggcagctgagccgctgcagccgcaggcccgggccctcctggcactgcagtgggggctcctgggcacaccccaacagaagtgagccccaggaggacccgccgtggagccaagcatcacagctctcctccttcaaccctcagcggacagagctgaggaggattgcctctgtaagcttccatggccctgcccagctggctgcccagccttggagggtgggcactgcacacgtgaggccctctctggggtgcatgtgacccctg

SEQ ID NO: 9971 - DNA, 526 bp, Canis familiaris
  misc_feature (1)..(526): n = a or c or g or t
tgcnnctgcancaacaanggcgtctactaccagcgtggtgacagctttgtgactgaggactgctcccagcgctgcacctgtgccagctctggtgtgctgctgtgtgagccactgagctgccgtgctggggagatatgcaccctggnnaacctcactcgaggctgcttccgagagagcccgtgtctacagaacccctgtcagaatgatgggcggtgccaggagcagggaacccacttcacctgtgagtgtgagcttggttatgggggacacctctgtacagagtctcggaatgtgccacctccccgaaaaccagaagcatccaactttgcggccatcctgttggggatgcttgtaccagtgctggtcttagtgcctgccgtgaccagggcatgtgtttccaggaagaagagggagaaaacgcagagctagagcagaggcagactggcagacactggtgagaaccatccccaccccagaactccagcagctggaagctgagtctgcctctgatacaggtttgctcgct

SEQ ID NO: 9972 - DNA, 608 bp, Canis familiaris
  misc_feature (1)..(608): n = a or c or g or t
atttttgctgctgcntatgctgctgctgcaactgctgctgtggacgctgccgacccaaatcatcggtgccagaagaggacttttatgtgtccccagaggatcttgaggagcagatcaagaccgatatggaaaaagatgtggactttccagttgttctccagcctacaaatgcaaatgagaaaacacagctaatcagagaaggacctcgaagttattgcacagactcttaatattgagaccattgagggcccacaatatcccctcttggttcagccatgtctccaggtggtcatgggtgggacagggtaaggggcatgaaatgctgtgaacttttccacattcatattttattttttaggttagggaaagatgattgctacataattttctcagtatgcattctcattccttgagtagaattcctaatgaaacacattccattttgatgaataaaagcctgaagagttgttttatgctcctcacatgaggtaagatggtggcactggacaggctttatgagcctgtccttatgtgacctagatctaattccttacagactaaagtagcactccaaacagaagccacttctcatctgtttaactgaatgc

SEQ ID NO: 9973 - DNA, 596 bp, Canis familiaris
  misc_feature (1)..(596): n = a or c or g or t
acanggtaccctnagancatatgtgcattcagnagaactcttgtctttgctagcactnntcaggtgggtctgnctgnaatgtctgagaaaaaagagtccccttcccaaacaaacatccattgtggccactaatctaatctttaaattgggcttgtgggtgttttatatatcatcccaggtaccccctctgctccagtcctgttcctctgggcaatagctccagggtaaaaatagatattagactgctgtgaaaatttaagagtaactacttaaaatgctctgggagttcttggccaatctgtgaagctggacctctttttgttgtggggctacttggcttaagagatgatatagtagagaaaatcaggttgtattttaagcaatcagcagagatcaatattgtatagacatgaggaaagattatatatatttctgtagtagtgccagggacagactggccaaagaccaaacactccagggtccccagaaagtttgtccttttatcatagtgtctttagggtcaggtgtgattatgaagcttttcccaaagatatggggatgggaatgggcatgggtagcaggagtaatgcagtcac

SEQ ID NO: 9974 - DNA, 609 bp, Canis familiaris
  misc_feature (1)..(609): n = a or c or g or t
ctgaccgattccangcagtgtcnnggcatccacatgcagtgnnnngacgatgaggactgcttcacaggccatggggtggctccaggcctcggccctatcatcaacaaaggttgcctgctgtccacttcttgcggccacgaggagccggtcacctacatgggtgtcacctacacgcttaccaccacgtgctgctacggccacatgtgtaacagggcccccagtcccgccagatgggaggggcgggccgccggcctggcgctgggtgtgctgctgctgctgctgcttccacgtttgctgtgaccaacctgaagggcaggacctgggactggtgtcccggctccgctgctccccgagccccccgcctccaccccttctccccattaaatggccagaggccctggacaacctcttgtggccccggcttcatccattctagggctgtccacccggagcccagtgctcggcgaagcatcctcaggccttattcagtggtggggagccatgcttggtgggtttggctgtacccctactgtatttcattggttctaagacgcgtatcttttcacatttcgatcaggatgcttcttttcattggtggcacctcagagt

SEQ ID NO: 9975 - DNA, 631 bp, Canis familiaris
  misc_feature (1)..(631): n = a or c or g or t
gngagcngnactcatccataaacagaagaagaagcactcnnnnctgcancntgtccccatcaatatcacctccaaggaggactctgatgtgacagaggtgatgtggcaaccggctcttaagcgtgggagaggtctggaggcccaaggatatgttgttcgagtctgggactctggaatttatctgctgtatagccaggtcctgtttcatgatgtgactttcaccatgggtcaggtggtgtctcgggagggccagggaaggcaggagactctcttccgatgtatccgaagcatgccctccaaccccgactgggcctacaatagctgctacagtgcgggtgtcttccacctgcaccagggcgatattctgagtgtcacaatcccccggggaagggcgaaacttagcctctctccgcatggaaccttcctggggtttgtgaaactgtgattatgatacggatggtggttttgagctcggaagacgagggtgggtaatactggacacagccacgagctaacaggagcagaggcctcttctgggtttgacctcaaccctgggttggacggctcatccatctcccttcctccctttgcctcatcgcgccctcaccttctagacttcgctttcacggat

SEQ ID NO: 9976 - DNA, 412 bp, Canis familiaris
  misc_feature (1)..(412): n = a or c or g or t
ctctagagaannnnngagtctccnnnnncgtcccccaggnnnctggctnnnngnngcaggatggcancnnngctgagattaatatctagggttctcnnnnnntgtnntgnnnnttgagcccnnncctgttagacnnaccctgnnnnncnnnttctgcgnnngctgtgnanttggtgacacnncataaggnntagtccnnnnnggggtatcagagccctagggtgccccccatcccctcccccagtcagctctggcacctgnnncnnnnnggaacatgaaggactatgctctgaggctatactctgagcccatgagagcagagactggaagggcaagaccagntnctaaggaggggagagaagggcactctgtctctctccagaccatnnntgnnntttaancagggtcttag

SEQ ID NO: 9977 - DNA, 656 bp, Canis familiaris
  misc_feature (1)..(656): n = a or c or g or t
ggacggtgtattcagtgggtgnnagcattgctccaaggcggtatgtctccaacatctatcgctatgatgagcgcaannaggcctggtgcctggcaggaaaaatgagcatccctatggatggcacagccgtgatcaccaagggtgaccggaacctgtacattgtcaccggccggtgcttggtgaagggctatatctcccgagttggagtggtggactgctttgacaccaacaccggggatgtggtccagtgtatcaccttccccattgacttcaaccaccggcccctgctctctttccatcaggacaacatcctctgtgtacacagccaccggcagagtgtggaaatcaatctgcagaagataaaggccaacaagacgaccacctcggtgcctctcttgcctaacaactgccccttggatgtgtcccatgctatatgctccattggagacagcagagtgtttgtgtgcgggggtgtcaccacaaccagcgatgtccagacaaaggactacaccatcaacccaaatgcctacttgttggaccaaaagacaggcgagtggaaaaccctggcccccccaccggaggcactggactgtcctgcctgctgtctagccaagctaccgtgcaagattcttcaaaggatttaaacaantttttaa

SEQ ID NO: 9978 - DNA, 507 bp, Canis familiaris
  misc_feature (1)..(507): n = a or c or g or t
cacttctgaggtcactgatgagcagaaaggtactcttcggaaccttattttgacagccttcatgccttaagattggagaaatatccattcatgactaagacaaatcccttgagtcctggcttccagaaatggggttgcaaaattggccctgccgagatgattctcaccatcttcagagggatagtgtggtcttagcacctgttnctcaggttttcaatatgttttgaaaaggtaatggnnnnnntgacctgcttccagtagattttcaatcaagacatcagtaaatggattttgggaaaaggaacactttggtttcttctgtccagtagactgaagactcttgtccttttgagaatacacaagattctttgttaaaagggtgggatcatttgggaaggaaaggcactcaaagttcaaaagattattttaatgggatgagttggaagaattacccaggtactggttgttgaccagtttgcatatggtgccacagaatannncagacaa

SEQ ID NO: 9979 - DNA, 575 bp, Canis familiaris
  misc_feature (1)..(575): n = a or c or g or t
aaacagatgttcggaccccaagtgcttacaacgcgacactatgtnggctctgcagctgnnntccccgggaccccggagcatggccagttccaaggcagccccggcagtgcctatgggaccgcgcagcccccgcctcactacggacccacgcagccggcctatagccccagtcagcagctcagagcaccttcggcgttcccagcagtgcagtacctgtcgcagccgcagccacagccctacacggtgcacggccactttcagcccacccagacaggcttcctccagcctggcggtgccctgtccttacagaagcagatggagcacgctaaccagcagaccagcttctcagactcttcctccctgcgccccatgcacccacaggctctgcatccagcccctgggctcctcgcctctcctcagctcccggtgcagatgcagccagcaggaaagtcgggcttcgcagccaccagccagcctggccctcgtctccccttcatccagcacagccagaatccacgattctaccacaagtgatcatcagattttatcttcagcctcagccacagcccctgacg

SEQ ID NO: 9980 - DNA, 606 bp, Canis familiaris
  misc_feature (1)..(606): n = a or c or g or t
gtgcagggacagcccactcattcctgtggctcacctgnngnnnaggnngcggtcaaggcgggggcgcaggggnnggnntcagaggnncagccacgtaggggcgctgaccaggcatcgccccatgcgcccttcacctgaggccccgccggcccaccgggccttccgtccgtgagtcgctgtggaggacggtgggtaacgtgcttcaagaaacacccgaaatgccacaggaccaggggctgtgggtcggggagcagacccggcctggactctcggctctgcggctggttccagtgacgtaggaggtccccgcaggttggagggctttcctcggggcgttggctctgtcctggcaaggccgctggggtcaacgggtgttgctttacgggaatgtgcccatctgggcctccccggcggccttgcactcgaggccactcctcccagagcacatccagcaggtgcccctgtgttggaagcgacactggtcccgcctcggctgaggtgggcctggtgcgctcccggcccagggacctcgggtggcacggggcatgcccctgccggggctgctgtgtccccacaccgtccccannnctccggaatgctgagctg

SEQ ID NO: 9981 - DNA, 513 bp, Canis familiaris
  misc_feature (1)..(513): n = a or c or g or t
ctcaaggagaagcacangcagagnggcgggggcgtgggggcactnnaagagctggagaatgnnttcagcctggcggaggagtcctgtcctggcatctcggacaagctgatggcgcacctggtggagcgcgtgcagaggttttcccacaacagaaaccacctgacgtcaacccgctgaggcctgccgctgcctgaggagagccgggaggaggggctggcgtggagctccgcggtccggctgcctcggccccagtccccgctcctgcgctcggccacccctgcctcctgcagcacagcgtcgggggagccaccgccggacggagcagcggaggctgtcgggcccatctgtcccccgggcccgcggcggccgtgctggccgtaggtttgccttgtgtcaatcaggtannnnnngtctcctcctnnnnnnctcggatcagccaggacttttttttttttttttaaagaaaacggacttctcgcttccnnnncgttctgaggttgaggtgttttcata

SEQ ID NO: 9982 - DNA, 374 bp, Canis familiaris
  misc_feature (1)..(374): n = a or c or g or t
cttgtgagtcaagannatngaaaaacaaccttcaccntnngcttcctataagtnnnannncttcnntaaattaaaannntnnattcccgagtngnnnaccacaacagagaagggctcgtccacctgttttattggcaaaagaaatcctnnnnnngacaggtctgagcaaaggggaggttgtgttcatcatccgtctctgatgagaaacatgtgcttttagcagaagagagatgtcacctcactccactaaagtatcatgttttcgaatcattagagaaggtgttttanntgctctaagttgataacaaactcttttgtaataatatgtaccgtaggacatgagtctcttttccctgaaattttagatgtagaca

SEQ ID NO: 9983 - DNA, 535 bp, Canis familiaris
  misc_feature (1)..(535): n = a or c or g or t
ataatgctcttttgccgttaacactgataccactacacagtatttatgannncagaggttggggagaatttttcttttcaaaattaaattgaattgctgcatttcccaaaccttgggatctttgacagggggaaaaaaacctgaatattaactatgagcacaaatttgacgggggggaaaaaaaaagacctttattttatcaagcttttgaaagtcttnnntgtttnnnnnncattttcagcgttgacgccaacatagattgtcttaagtcatttttttcccaaaacacttgaatcttgatcgttggtacgtagtccacgctccagggtccagttgtattttagacttcatataagtccagtatgtgtagcacaccactgttttattaatataaaaacttgtaaatgactttcagatgggtgatagaagtaagtcacaagtcacaaaaccttgctattcatggttaatcaaacagtttcttttccccccaggatgtggtgtaaataaagaaatattannnagttctgttctataa

SEQ ID NO: 9984 - DNA, 613 bp, Canis familiaris
  misc_feature (1)..(613): n = a or c or g or t
ctgttgtgcccagttgcttcatgttcatgagatcttccttgattgccactacaattgggaactagtgatctggtgcatctcgttaacgctttttctgctaagatttgttacccttggatcagaaacaagtaaaaagtatagcaatacctcaatattacttactgaacagataaacctctacttgaaaatggagaagaaacctaacaaaaaagaggaactgacactagtgaataatgtcttaaagctggctactaaactgctaaaggaattggacagtccctttagattatatgggcttacaatgaatccactgctttataacatcacccaggttgtcatcctgtcagctgtttcaggtgttatcagtgacttgcttggatttaatttaaagctgtggaagattaaatcatgacaattcagagaaaagatgtagcctcttttccagaataagagtaccaactaagctgcctgaaagcagtcactgactctttgcttcaggagtctcagctgggaaattgaagtgtttacatcacactgtcttgtgcaattcttatatttattttacttgttcannnttttttacatttattttagtctttctttatattttatt

SEQ ID NO: 9985 - DNA, 549 bp, Canis familiaris
  misc_feature (1)..(549): n = a or c or g or t
aaccaggaggnngcagacagnnagtggcgcagaaaggaaaaggaaaacgcgcagaagaaggnnnagacagaggccaagctgcgcaaaagccggctggagcaggtggctctcaannagcatgctctggccgttcaggtgcaacgggaccgggatgagttcgagaggattcttcgggcgcagagagagcagattgagaaggagcggctggaggaggagaggaaggccaccgggcgcctgcggcacgccaacgagctgcggcgccaggtgcgtgagaaccagcagaagcaggtgcaggaccgcatcgccaccttcgaggagggccggcgcctccaagaggaggcccagaagcggcgtgagcgcatcgatgacatcaagaagaaaaagatcgaagagctcagagccaccggccttcccgagaagtactgcatcgaggctgagcgcaaagccaacatcctgccacctgcctccgtgagctgaggggtgctgcgtgtccccaggggcgcccacctgcggggcacaggacctgcccaggctcggggtgtccgtggc

SEQ ID NO: 9986 - DNA, 594 bp, Canis familiaris
  misc_feature (1)..(594): n = a or c or g or t
cccacttctcataggagcatagncaggagcagatgaggcagngcagagggctggtccctcttttcctcccattcttcctcaaatgttaanngtctccagcagtgggaggcagccagagactgtgagctttgtgtgtatcctccctgaacctctgctcactctcagggccaagaagctccaagatggagccctctctgtagaggcagggccacagtctgaggagcagtgctgggttacgggcattttcagtaagcagccagtagactgtgggtgcctgcctgttggtaagcctccccgcgctgggtacagcggaagaggagcctgaggagcctggcccagcggactctgcgctgcagtgggtaagttgcagcagccctgggagcgagggcctggtcaggggccacggggagcttgttcctgggcctgtcttctccctgtgggaggctctggagcctcctcctgcccccagcctgggcctttcctggtggtcttaaagatcagcatggttcctctgccttcagcttttttcagaggcgtccagtcctgtcccccagtccccagccaggtggtcaggactaccactcctgcagctct

SEQ ID NO: 9987 - DNA, 604 bp, Canis familiaris
  misc_feature (1)..(604): n = a or c or g or t
catcgcaaagtgtgttgacgcnnnatactgaccccctcaggcannnnnnntctcccccttgttgctggtataaaatnctaaactatcgtgnnnngttggagaagtaaacctctgcagcactgaagtattctgttgaagccctttattcctgattcttggggtagacctttactctcttatctgtttttccagtctgcattaaataggcacaggaaatgattttgcaaatttgggaagaaatgcatccatattttctccagaactgtttttaaagttgcgtacacattctagcttcgggtaagacagaagtttcactctgtcagcatttggaaaaatacatttggagtattacttacaggcgtggctattttatgttcctgttacatctttattttttgaaatcagagaagcttttgtcatagttggcaattctacagatcaattctaagtttctaaactaggtagaaactgaaaatgcatttagaagaatctaaagaaaattgaattaaaaaaatctgaaagttcaagttctaaatatctggaagtaggtggaaaataagtgtattgttctgaggatcacatgatggaaagcattattttgaca

SEQ ID NO: 9988 - DNA, 641 bp, Canis familiaris
  misc_feature (1)..(641): n = a or c or g or t
ttcctgtaaggnnagncaaganntctgaaaagttatcttcctaatggtccctnaggcttgggccagaatatgattggctctctgccctaccattttctctccagaaagcaggcgtcacagcctctagtacctaagaagagacccaaggtctaggttttcttcgcctttcctctcccctgccctagacctctggctccctttctcttagtctctctggtagccccaggaggcctgtggtagatctcatccctgttggatgccacctgcagtcaatttcctgtcccacctgcctctcttctttcctggcccagacctatatggccatgccttggctctgttcttgggaaggcctgctacctgtgtggtggcctagctggtccaggccctgggatgctgcatctccaggcaactatgcactttcctagggagggaactagtatgagatatgggggctgggcatgaattcatctctgctggatggtctgggttgggggtgtggtggaggaaggcccaggtcagttctgggaatcctcaggtctggccagccagtgatctgctttgcattttactggtgcctactgctcctccttctttctgggagacacagaccattgtccaactggcagttgacctgcctgagc

SEQ ID NO: 9989 - DNA, 365 bp, Canis familiaris
  misc_feature (1)..(365): n = a or c or g or t
gcctggctccgcgccgggccagaccccaaacccacagagagcgaagggaaagagccgactccccaaccccggagccgaatcacatgacctagacggcccacagccaccgggccccactgctttgtcagccccatctgtccccaccatgcgccattggggcggggacggggccgcatttctggccgcccagccggccgatccatcgcctgcgtggggaggtcaccaggccgggcgtggggctgcagtatttggagatcacgttttttgtttttttttttaattcaacttgaaganncgtatttcccctgaccatcgaaaaaatgttcagaggcaaacnnngtaaaaaggtcatccccaccccgcca

SEQ ID NO: 9990 - DNA, 658 bp, Canis familiaris
  misc_feature (1)..(658): n = a or c or g or t
catcgtaggtgtagttngccatcaatttctgaactctcccacatcagttgtgataccagattgctcaaaactgagttctgattatgttgtgcccttgatttgtgtctcaaattggcatttttaaaaacgggcctttattgcctggatataataatagtgcctgccaccaccatcagacagacctggtgctctaatgccaagttacacacagggcagttactggtgtgtcttcgttggcactatgaaatgtggctgagaagacagactctcagagtaagaagtccgtattggtggtaagaaactcaggagtacttttgtctcgaagtactagctatttagcatatagctctcacgcgacgcctgtctgtgtgaatccgggtgagatgacgggccctgctctacttaatgccgttgtgcataggataccattttgggaagctacctaatgcataagctttttaatgctgtaaattatagtagctaaaattaaatgccacttaactttttcagagatgaattaatggacagcctggtcaaattcaaagctttttgatgtataaaactttataaacggaactattccatcgataggcaaagtgtaatgaaaacctgtctagatggatagtatgtaatttctgcacaggtcttgtttagtaat

SEQ ID NO: 9991 - DNA, 172 bp, Canis familiaris
  misc_feature (1)..(172): n = a or c or g or t
tgtcttttcttcccattttntnnncattannactccaaacaccattnctaggtccaaagtctatttccaggaatggctattnntaatgttgaatttccctgaatgctaagcattttattttaagatatttatacccagtaaatatctaggacttaactagttctcatgtcat

SEQ ID NO: 9992 - DNA, 703 bp, Canis familiaris
  misc_feature (1)..(703): n = a or c or g or t
ccagtttactctcctcccactnggtagaaggtcaaaagtcatggncatgaggccannaangccccagaacattcccatctgatagatgagaaagccgatttgccagagatgcctgtgagtcccaggcaggcccaggagagccacagccagactggaagatgggactcctgcaggggcccaggcggggccggcctgggaagaaggctctggtggcaggcggttcggggagcagcggggagggtgtcggaacaaaggggcatgtgggcgcgacgtcagctttggccaaaaccagaatgggtctcagcttgtcacatttaccaccaactcagcagcctccctggcatcgtctgcaagatgcaagagctttccggatgcagacgcggggccccttggcactgtccccagacccacaggcctgttgccgtcataggcaaacgggtgtttccatgaacttttattacttggcaagacagtctttgatcagatgttccacggctggaagattcttactgccgagccagagggtggcgcgcagagccttccaactactgcccctcggggagcggctccagacccacccccccacccccacccctgaagcgagagctactccccacccaagcccaaatcatttcttttgaccaaagatgaaagccattaccattttaataatataaatatttctttgaaaaagacnnnnnnn

SEQ ID NO: 9993 - DNA, 567 bp, Canis familiaris
  misc_feature (1)..(567): n = a or c or g or t
ctgggaacccagcannngctgtagctacggtcancctgacaccatacgtgggggtgtnnagnctcgtgtctgtcagacgccggtgtgcccttnctcagcnannnngaactgctccatcctcctggataaacatcatacactttcctcatcttagattcacttgcttgtctgtagccctttcccacctatatgtgcttatccttcagggcccgaccaaatgtcgcctcttttgggaagccttccttgattgcctcaggcagtggcttatgtctgccttctgagagcgcacgttattttcacctgcgtatctgcacgcctgacaaatcgtctcacacatattggtaaaggaatagtccgatttacttaaatgttgttattattgagaagggttatataatcttttaatcgtgtatatgttcatggatgagattcaaaagattttctgttgaaccctgcgttgtagttttttggtccnnnnnntgtggtgactgcccctatccaaacctgcattcaggtgacaggtaacatgctgtgagtgacatgtcacttggctgtgattgtgctaaa

SEQ ID NO: 9994 - DNA, 576 bp, Canis familiaris
  misc_feature (1)..(576): n = a or c or g or t
gaaaatacacatttgttttatgtagtgttttctnnaggtataatactgtcaaatggtgcactttgttatggaaattgagcattactagaaactatcataacttttgagtcattattattngaaaatatttgccagatagcatcttcaagatacgtttccatttacattcacctaaagagtgtaccaaaatagaaagtggaaaaaggcaccttctatgtgtttaaaaaaaaagtttaatctgaatgtatttaaatgtaaatatcaaagattaattttaaaaattgggaaagcataaaatctgtatatattttgaatgttttacacctttgaaataactaacttgaaaatatcaacctctgtaattatacagatattcaagagcaatactacagtgccaaataatgaagcaccattttttttctcatggccattttcaggattagagctcatatagactgcagggcagacttacatatcgtatcttgtactggttaatttaaccccatttatgaacagatgaaaattttattttcttatttcatttataagatggttcaatgtactgggaggcttttt

SEQ ID NO: 9995 - DNA, 453 bp, Canis familiaris
  misc_feature (1)..(453): n = a or c or g or t
acactcaaaatgatntagctatgaccagatactttcnnnnnagtcagctgnnnnaagtcaagactacaggcctcaaagcccattgtctccccctccctacctcacacacagcacccctggcagcnnngtcaaagggcncagtcattaactcctaagagtcacaacaaggacagcgactggatcacaccagcctcttcaggggcagagnntacctggacttgagaataccaacagccaaatagggtttgttcatcttgcagacacagtactcaccacgtcacagtatgttaatgtgaactcccaggggttagttaccatgtcacatgtattnctgaattcccagggcctagctttaggcttggcattcacagggcnctactcatcagttgtagaataaatggaggtctattaggatttcaaagagagaatttaacacagcaaagtgaccctgat

SEQ ID NO: 9996 - DNA, 534 bp, Canis familiaris
  misc_feature (1)..(534): n = a or c or g or t
aggnaccacgagaaggaccacnngcgaanccacagcatgggacacatttccagcaagagcagtgacaaactgaacctggttactaaaaccaaaacggacccagcaaagactctggggacgcccctgtgtcctcggatggaagacgtccccttgttagagccgctcatctgtaaaaagatagcacacgaaagactgactgtgttaatttttcttgaagactgtatagtcactgcttgtcaggagggatttatttgcacatggggaaggcctggtaaagtgggtttattgtcatcccaaaaccaggccagctctccaggtggaactgtagtatagcgacccaccactgctcgagaaccctcggcccgacgtggtcctgcgggagcggcggacggaccgggagctgcacttcagccccgagcacggacactcgcggaggcagcggtcactggagtcacgtgggaggcccccgtggggcccgctcgcaagggcgccctctgcctttcacccaaagaagctgttcccatttttaaatca

SEQ ID NO: 9997 - DNA, 526 bp, Canis familiaris
gtgagccgtccgcctttcctggtggcttcgtcgtctcctctttgtgttccctccgtttttcaggctttactccagtgggccccttcccaccagcggcgtggcctccacgtgcaaaggaggtgtgtaaaaatgagtagggaacattgcagagtggtgcttcctcaccgtataatttgggaaattcacccgtgataaaggttcagagcataggcttaagaggtgaattccttgactacttaataattgtatatttcggatgtatttatctgcagaaagaaatacggtattttagttttcctgtaagagggatcaaaataatgctggtgtttgccgtagtttcaggtacttcaggagtacagagacgcgcttacaaatacacttacttttgaatgatcatggctatgtgtttaaatacctaaaattcaacctggtgtttacttgtgcactgtgaatgaactttgtattcttgaaaccatcacactccgcgtagacgtcactgcaatttatattttgcctgtgcttaatt

SEQ ID NO: 9998 - DNA, 227 bp, Canis familiaris
  misc_feature (1)..(227): n = a or c or g or t
tcnntgccccaggggtcactnnnngtcacggcantccccccatcactggtgcaagatacttctcacttccccagcgcctctttttaaaccacgatttcccgctcattttggtcacnaagcagcnctgttctnnnnnggcctacagactcnnnancacccccggnggtannnnngaagaanttccnnnnnnnactcagagttaaatcaggggggcannnnnnctcctg

SEQ ID NO: 9999 - DNA, 497 bp, Canis familiaris
  misc_feature (1)..(497): n = a or c or g or t
caaagacnnggtgnctgtgagcccatcttgnnggatgacannnnagcnnngnnagtgtttagcnngtctcttaccataaaagtcaccatcatgtnnngcttgactattttcctcaagagaagaattcataatacctaacagaaaaaaaaaactagataaaaaatgagcaaaacaactgggaccaaattattgataaaaagtagttagtttcaccgtctcttatggctaagcannncttttgatcgatggtgtgagccccacggtacaccacagccttggcctggtgagtgccttctgtagactggctgcagcagccctctttcatataaaaggaattcatcttaacagaaagccctttgtgatgcagaagggacccacaccttgttatggggggaatccaagagcttcccttatttctggtttacagaagcagtcacaaggcaccatagtgagtatataaaagccattaaatttgaatgcccttcataaactttttt

SEQ ID NO: 10000 - DNA, 618 bp, Canis familiaris
  misc_feature (1)..(618): n = a or c or g or t
tcgaaaaaagaaaaaacttgcatgggggttngnngcaaagaagagatgnnnnnccaagagcaacatgggatatatgtaacttgccagaattcctcaagacatttgagtcttgacttgggtttttacctgagtcttcaactgctcaatttgctgataatgttaactatatcaggaaactaatagaagctggaaaaataagtataaaatttgggagttggttattaaatcttgtcagtctttttctaaagagttccttctattgaagtgaataagatggagtgatctgttatttgtatgagaaatctaagcatacgtactgggggaaaattatttatttatttatttagccctctagtataaaatcagttttacttttcatccatttggtgtagcatagccagggagttccttgttcgttcttctctgtacccagtggaactgcactcactctggaattatgttttaagattggcatttgtttataatagattagtagtgcaatgaagtctcaattgatactgtttttacaaatgattttaattatcttaatgttataaaagtaattattctttattggaggcaatagagttgatatttcacagtcaaataatgacagca

SEQ ID NO: 10001 - DNA, 661 bp, Canis familiaris
  misc_feature (1)..(661): n = a or c or g or t
ccctcgatgctctattccttttcggattnngctgcccatnntctcannngagttcctgctaacaggagtgctaaagcannnngccaagccagaggcgttcatcttctccactttngaaatgtcatcctcctgaaaatgtcactacaatactcttttccctcccagaccagtgaataaaagtgttagagtaagatttggaagaaagaacctagggctttagagaggattggggtaacttgacctgacttatcttggaatattatgggtaaacaacagatagggaggtctggagccacagatttcttaagtggtcacttagggttgggtggtaccatactcagatatcttagcagaactgatgtacttactgttctgggcagacacagtatcctacctcctgtttggaagccacttcttttcctcttactgggatccttactctcctctgaaagatagtggaacagttttagtgtcaggaacttgaagggatgctgggagtgagtaaatttgaggttggagttatggaatcctctagaatattttcctttctcctccatcgtgttagaagcgttctttagctttgactttgagcaaatctctgcacttttctggcctgcttttccagtgtttacaaaattagcttaggtttaannnnngataa

SEQ ID NO: 10002 - DNA, 557 bp, Canis familiaris
  misc_feature (1)..(557): n = a or c or g or t
tcaaacctgganntagaattcctgttatnnaccgaccaagaaaagactcctttcaagaaagtgaggatggatataggtggcaagatggaagaggctgcagaactgtaagacggctatttcataaagacttgacaagcctagaaaccatgtcagaaatggaagcgggaagccctggtaatgtgttccaacttgtcaagttacaaccccaaagtcgcaatgtctttttcatccaaatgaggtttattattttcagcattccagttctgatctttcatagttcctgcttattatttaatgtgaatactttaaaaattgtaatcatggtatttgggcaacttcaacacattgtatgtattggtccctttaaaaagttgctatgaggctcattttatgtcagtaaacgtttcccactgatgctttttacagaagagggtgattatattccccatggggactatatcatattttctgagtggtatgtttgtatattctaaattatgtattgtaattttgtatttgaatggtgaatgtgtccataatataaatgacagaatata

SEQ ID NO: 10003 - DNA, 565 bp, Canis familiaris
  misc_feature (1)..(565): n = a or c or g or t
ttgcccctatgcacgagcagannagcgacgcaagtgccacaacactctacnnnnaggtctacatatgtggtggttttaacggaaatgagtgtctgtttacagcagaagtgtacaacactgagagtaatcagtngacagtcatagcacccatgagaagcaggaggagtngaataggtgtaattgcttatggagaacatgtatatgcggtaggtggctttgatggagcaaatcgacttaggagtgcagaagcctacagcccagtggctaatacttggcgcacaatccccactatgtttaatcctcgtagcaattttggcatcgaggtggtagacgacctcttgtttgtggtgggcggctttaatggcttcactaccacctttaacgtggagtgctatgacgaaaagacggacgagtggtatgacgcccatgacatgagcatctaccgcagcgctctgagctgctgtgtggtgccagggctggccaacgtcggggaatatgcagctagacgggacaacttcacaggattagcactgcgagatgaagtaaagtactccgcttcgacaag

SEQ ID NO: 10004 - DNA, 347 bp, Canis familiaris
  misc_feature (1)..(338): n = a or c or g or t
atgttcnnnnnnnnnntnnnngacnnnnnntatttnnnnnctgcatgtttannnngaagtttttcttgttttannnctatatacccatatgtatatgtctccaacagaaataatgttcatgatgaaatccaggcaggagtactaaaattatttagtgatgtacatttagccatcctaattattttatgtataaaatgatttctcattttgttagttgtaactgttggctattttgcttcancntttgtatagaccaagaaaatgtacattttcctcacagagcttatatgtaatagtaatccnctcaaatnnnataggaaaaaccaaacatgtnnngactttaaaaa

SEQ ID NO: 10005 - DNA, 665 bp, Canis familiaris
  misc_feature (1)..(665): n = a or c or g or t
atccattttttaaagcttactgcaanncaagccagcaggctagtgaactaaaccagtctgcttgttggctncnnagtgaatagtagctttgtgtaaatatgtttgacctaaagtcctacttttcctaaaattatcgtgttcatacctatggcatctttcccgggcccagaagttcgcaggaagtcgtgtgtagacaattcattgatatgagagttaccttgatagttctttgcaaacaatttgacacccatgcctgttctaggtttgggttgccatagtcacatttaaaatggggattgctcagtttgctttttaaggaaggaaccttgtcagattcttgtctctcatgctgctgacactcggctgggtccccaccgtgcccatgcagacccgaggccgcctgccttgccctgaacacgcccgagctgtggcatcccgcagagcatgtccgtgggaactgcagcatgctgctcgtgctcccacctgtcctcggcttgctggcttgactgggagcgcttgttatcaactgaagtgctggctcactggtttcctcctccttatttacaactctggtgtagcgttggtcggcatggatgtgatccaaatgcagcagcctgctcaaattggaaggctgcctccacaccacctgggtcttgagcatttgc

SEQ ID NO: 10006 - DNA, 453 bp, Canis familiaris
  misc_feature (1)..(453): n = a or c or g or t
ctctanntccagaacattttcatcnnnnnaaaaggtacccttgtatccannagtggnnacttcccattccttcccactnntagnnntggcaaccactaatctatatggatnngcctatnctggatatttcatatgaaagagtnacataatagtgagctttagtgtctggtntcttnnncttaacattttcaaagcttatccaagttgtagcacacgtgagtactcccttccttgtcaaggccgaatgacgtcctgttgtatggatataccacaatttgtttagcctttgtcttttgatggacatttgggttgtttctgccatttggctattatgatcagtggtgctatgaacattcaccaccagctttgtttggacacctgttttcagttctcttaggtataaacctgagagtggaattgctgattagaattggctcttcgggatccctgggt

SEQ ID NO: 10007 - DNA, 488 bp, Canis familiaris
  misc_feature (1)..(479): n = a or c or g or t
cacgtatgcgggcaaaaacatcggactnnctcaaggtgctgaaccgtgcacgcccagatgccgagaagaaagaaatgaaaacaatcacggggaagacgttttcgtcccgctaactctggggaacaggaagaggaggcggctggcagctgaaggctggaacacttgctactggataatcgtagcttttaatgttgcacctctccaggttcttaagggattctccgtttgggttccattttgtatacgtttggaaaataatctgcagaaacgagctgtgcttgcaaggacttcatagttctcaagaattaaaaaaaaaggaaaacaattccacttgatcaacttaattccttttctttactttccctccctcactccccttgccttcctccccctcttccaagctgttgcgctttgcaatatgttactggtaatgagttgcaggataatgcaatcttaacttgttttctcctaagtgtttgagttcaaaa

SEQ ID NO: 10008 - DNA, 522 bp, Canis familiaris
  misc_feature (1)..(522): n = a or c or g or t
aaaataccaactagcttttggtgcataatnntcaatggatttgtccttttgggtctcagtgacttttgatttggaaaatgcgggttatcttttttaagttcattgtcatataaaagagtgtgcttacttttaacagatgttaaatagcattccagtatgattttaatctttaaaataactatctcagttttgcataaaggtattcaagttttgaatttagctattaataatttaagaactaaggaaattataattttgaaccaaaatttaaatggcagtatgttatgttacccaaagaataattactgtttttgcaggtagatttgactttctaagggatattattcaacactgtcaaaatatatggtaaatagcagaaataatatgtttttttaaaaaacttagtgtgaagtatctactatagagaacttaagcatctcttctctgaagattcctcttgactatctttttaaatcataatcaaggtttctcaagacttaaaatggtagaaaacaatttcta

SEQ ID NO: 10009 - DNA, 559 bp, Canis familiaris
  misc_feature (1)..(559): n = a or c or g or t
attcctttagtggccccacagnntcagccttnnnctcanctgctggcagaagggtgaggcagggagaattgtgggaaagcgctcctggcgtggtgtgcgtccctccgggaggctagctgnacgtgggcatgccggcccgcctggagccagcccttgccactctgagtgctgcccccccgccccagctggtcctgcgagttcagcttctagagcccttatttttgtaatttttttacttttaaaaaaaatccctgggctctgtgcagccctggcttcctgggaggccccgcatcctgccttccatggagaaggggcagtgctttagcctgatgctgagactataggacggtcccagcatggcgggggcggggggtgtccttgatcagatggttccgtgcagggaggggacggggaccccgggtgcagcttgcagcacccccggatccgtgcctgccagctttacctcctgcacgcggcgggaatcagacactcagagggcccagccaagcagcccccgcgagtgctccggttggggcaagacggccaacctccaaccaga

SEQ ID NO: 10010 - DNA, 644 bp, Canis familiaris
  misc_feature (1)..(644): n = a or c or g or t
gcaatagaaaactcctggattcatttaaggagaaagaaaagagaacgagtgagacaactgagagaagttcctcgagctcctgaggatgtcattcaagccttggaggagaaaaagtccacccccaaagagtctggcagtagccaagatttggcccagggcacccaggagagtatctcatgcaggcctgctgtacaggaaggcgaggctaccactgttgagggccattgctcaagccaggatctgctttcccaagaagaaaacccagaacctgtggaggatgaaaggagtgaggaaaagggagggatagaggttttggagagttgtaaaggctctagcaatggagcccaggaccgagaggctcctgagcaattcagcagtccagtgtctgaaaagcggagccatctccaaggagtggctggacattacctattcaagtgtttgataaacgtaaagaaggaggtggatgatgctttagttgaaatgcattgggttgagggccagaacagggatttaatgaaccagctttgtacctatatannnnncaaattttcaggcttgttgctagttaacttcttgcacagttggaaaggtttttgtaaagcagcttgcttcggggtgacaagatgcantccaccataggccca

SEQ ID NO: 10011 - DNA, 528 bp, Canis familiaris
  misc_feature (1)..(528): n = a or c or g or t
ctcnngtagcaggtnnacaaaacactcccacacggggggccccaggtgagaacgcagccactccggctcccaccttgcatgtggggaaactgtctcacaggcntagctcaggcactnnnggcaccacagaggggccacacagcagacactgctctgcagcctgaagtcggccatcaggtgctgctaagcgtcagtgccggtgagagccgagtccctgctgtgttcacacgggaaatcgtgagctctgatctccgcatgggacacaggtcccatgggggtcccgctcccatgacctcatcatatctaactgcctagaagcccccccagtgccatcccaccagggtggggcctccatctgcagactcaggggtggggggtggaaacacaccaagcttggggcacggcgccccaagaccagactcagatctcagccgcgccctggcctctcccgcctccacccctgggagcagcttgggggcttggggggctctggggcactcatcaccccagggaatcatcacagtgatg

SEQ ID NO: 10012 - DNA, 675 bp, Canis familiaris
  misc_feature (1)..(675): n = a or c or g or t
annagtcagccagccacgnnatcgctgccatacctccacctcaagcagccctgnncttccctcctagagccacccacagcagcaaagggctgaggaccacttctgagaaaccttaaagcagtctagtggcaactttgtttaagagccaacattcctccagggctgcccagacctcagccgctcaacactgtggaactagcccctctgctgaggtaaggctgcctttcattctacccatttctaccctatttgtaaaacaggcacacttacctgttatcccccacctggatctcctgtctgtttacatttacaggttctggcttttttctaaccattctttatcctattattttccctgtcctcacaacactacactcaatcttttggtaaactctacatacccaaaagtttaatctgacagattattgcataggattttaagattttgggggcaagttaatgtaattattatccagaaactgcagctataacctggaagctgcagaattgttttaagttgattatctcatctgaattaaggaattttataatttaattttaagactgaaatgaagacctagtaacttgtgtgagatctgcaaaacaaaattattgatttctggaaatttttattaagtccttcctaattatttttgtttgtagtctgttgtaggt

SEQ ID NO: 10013 - DNA, 612 bp, Canis familiaris
  misc_feature (1)..(612): n = a or c or g or t
cagcgagcagcaggnagtaaaggtgtccaanncagagtgggatacagaccaatngaagactgagaactatatcaatgagagcacagaagcccagagtgaacagaaagagcagaagtcaagtgagccaacaaaagaagtcccaggttatggctataacaacaaactcatcttggcaatatctgtgactgtagtagtaatgattttgattatagttttctgtctcattgagatttattctcatagagcagcaccagtggaagatgaagaaggaggctcaaggctcttctttaattctctgctgcataagagatgttcaatccaacgggagaatcagggctttttctggagaaggcggccactgtggcttcgggacatgtacagacctctcaatgccacacggaagaaaaacatggcacagaagctacacgacagggattcttctgatgaggatgagattttcaacaaggaaccaggagagaaaggtggtgccccagtagagaagcctcgggctgcagattcagctgctgaagacctgggtgaggagagcgacagtgaactccgcaccgtcatcgtcctcaagtgactttgtcctgcctcaggctgtctataaag

SEQ ID NO: 10014 - DNA, 239 bp, Canis familiaris
  misc_feature (1)..(239): n = a or c or g or t
cagcaggcaagtgaaacattctgttttcnanaattctctttctcttcccaggttctcctttgtctcnnggagaaagctcctgtctgtggctaccactaatctattaggaaaaaaggacaatttgactacctgcactggaattctggttgatagcggtcaggggacaagtgaggggaaacgagaannnnnaaaagggtaatgaatgtgtatcagaactcttcttggagggatccctgggt

SEQ ID NO: 10015 - DNA, 588 bp, Canis familiaris
  misc_feature (1)..(588): n = a or c or g or t
aagtgtacaattctttttcntnctacagcatgtcagcatctcaagttcatttttcaacctacgatatnncaatttgtaataaagccttcatgagctcatggcgtgaagcactgttctgtcgtcaagtactctcaaatgtttctgatactgctgagctaagaccatgagaaaaagctagcactaagtcatgtttggagctctatcccatattctcctgatctctttaagtatttgttcctgccactgtacactgtggcgttgacttggtgttctgtcccagtgcggtgcctcctcttgactcccccactgctctctgtggtgagaaatttgccttgttcaataattactgtaccctcgcatgactgttacagctttctgtgcagagatgactgtccaagtgccacatgcctatgattgaaacgaaaaatttattgttacctctgagtttgtgttccacggaaatgctatccagcagatcacttaggaaaaataattctatttttagcttttcatttctcagctgtcctttttttcttgtttgatttttgacagcaatggagaatgggttatataaagactgcctgctaa

SEQ ID NO: 10016 - DNA, 479 bp, Canis familiaris
  misc_feature (1)..(479): n = a or c or g or t
tttcaaaatngtaaggaaataaaaaannncagatgacgcaaannnnncccccccccccccccaggagagaatatggggctgcagaccctccccccccggcctatttttgtaaataaaatgttataaacttgaaatacaaattgatgtttatatttcctatcattttgtattttctggtatttggtacaactggctgatcctaagcacgaatagatattggtgtcatggagtgccgtaaaaaaaacgtttttaattgtgaggcatgttctgatatgtgtgtaggcaaacaaaataaaacagcgaactttttttgccacatgtttgctagacactgactatactttattggagtgacatgaagtttcaacactaaacactgttgtatgagaatcattacagataatgtatcttttcatcttcctgtttgaactttctggaactgttttatagaagatgccagtttgctgttggtgactgtt

SEQ ID NO: 10017 - DNA, 658 bp, Canis familiaris
  misc_feature (1)..(658): n = a or c or g or t
ctcaagaatcactatnnnaccaaatcctcactggnctgctgtgctgcgcacactaaaggaccaaatcgaagagaacaccggccacaccttcaattccttgctctgcaatctttaccgagatgagaaggacagcgttgactggcatagcgacgatgaaccttcgctggggagatgtcccgtcattgcttcactgagttttggtgccacacgtgcttttgagatgagaaggaagcccccaccagaagagaacggagactacacatatgtggaaagagtgaagatacccttggatcatgggaccttgttaatcatggaaggagccacacaagccgactggcagcaccgagtccccagagagtaccactctagagaaccgagaataaacctgacttttcggacggtttatccagaccccggaggcactggtggtgtgagaccttgagagagcagccgtgctgacaccgagcacacctcccgctgcgaagaaacctgcagaggctggtgcagctcatctctcggggtagctgtggggaagacggggtgggatttgcttcccagctcagagtcctgttcagagacggccagcggctcgcgtgcgtgctctcttcaccgctgggacgctgctccccgatcgcatcttgaaatcacatattttctt

SEQ ID NO: 10018 - DNA, 603 bp, Canis familiaris
  misc_feature (1)..(603): n = a or c or g or t
ttgacccatcagcccccatccccgctgccccccaaaaagttnatcatggatcagcaaattgtcaatccttgtcaaagagagggacactgtagaaagagctgaagaagccaccttctgttcccaactcattttacccatatcttatgtaacatgaactctgtcttttttggtccttttcttacagatggacctcttttgagaagaattattatattccaaactttttagccctcaggttactaagataaatatatgtatatctaacctttattatttcatatatctttctggataatacattcaggtggtgctgggtgattattataatctgaacctaggtgtatcctttggtcttccatgatcatgttgaggtggactacttagcctggtaaaaagccagattatcacataacttgatcctggcctttacattgagctcttgagagtggatacactcttttaaagtctaaccccagtataggggaatataaattccctgctctccagattccccatttttatcgttaagaagatcagagataataatgtcaacctgggattagagagagcacatgaactgagccctgcagctccctaggtaca

SEQ ID NO: 10019 - DNA, 580 bp, Canis familiaris
  misc_feature (1)..(580): n = a or c or g or t
gttaatgattctgttatgtgtnaatcatattcnngagtttttaaaaagtatatgaagagttgataattattcatggagtatagtcataaaatcgtagtgaaagaactaatggttttattttttagaacaaagtcatctaagctactgttaattgaattgttgctagaagtagaaactatagaataggattggcatttctgtgattcttgttgcttcttgatattttctcttgtatttatatatgtaggattgaggcattttctttcatgtagctttatcctctcttaaagagctgtttaaaaattcctgatttaactgactgcttcaggatcagcttacagagtcttgtttttaggatagaaacaaagtaagtcatacttggtaaaacacagcaaaataaaagacagtgttagaatggagaacactagaacccaaaatcagtatattcagaatgaaagctttggaattcgtttcctgtttgtaaatctagattgagaagcagaattggttaacatttatgtaaagatactgcattttttaaagattttaagtgctggtttctttgtattttaatctttgc

SEQ ID NO: 10020 - DNA, 643 bp, Canis familiaris
  misc_feature (1)..(643): n = a or c or g or t
catcacggcttccnngcgcttcgacggggcnntcaacgtngacctgacnnagttccagaccaacctggtgccctaccctcgcatccacttcccgctggccacgtacgcgccggtcatctccgcggagaaggcctaccacgagcagctgtcggtggcggagatcaccaacgcctgcttcgagcccgccaaccagatggtgaagtgcgatccccgccacggcaagtacatggcctgctgcctgctgtaccggggcgacgtggtgcccaaggacgtcaacgccgccatcgccgccatcaagaccaagcgcagtattcagtttgtggactggtgccccacgggcttcaaggtggggatcaactaccagccacccaccgtggtgcccgggggcgacctggccaaggtgcagcgcgccgtgtgcatgctgagcaacacgaccgccatcgccgaggcctgggcccgcctggatcacaagttcgacctgatgtatgccaagagggcctttgtgcactggtacgtgggcgagggcatggaggagggggagttctctgaggcccgggaggatatggctgccctggagaaggattacgaggaggtgggcatcgactcctatgaggacgaggatgagggagaagaatagaacagc

SEQ ID NO: 10021 - DNA, 583 bp, Canis familiaris
  misc_feature (1)..(583): n = a or c or g or t
aactacggctgcttnnacaactnnaaggtattcctgggtgtggacacacgaaggcactggctgactcgggtgctgttaccttccagtcacctgccccatgggaatggaatgagctgggacccccctccctgggtgactgctcactcagcctctgtgatggcggtgtgagctggatgtgtcagccacaacttgagcaccactctgcttcctgcatggtctcaacggcctccaaggatagcttcttggaatccttgggcaaaaagaatcagtgggcctgccttagagtatcatgcagggacaactcaaggaccagtctcttggccactgcataaacaaggcatgatgtggaaaaattctaggactgatgtctctttactcagctcaggcaaactgaagttccagccccagactggagattaggcagctagcaaccttgccaggtgctgaccccgacctcctccaggttccagcactggggttggccaccacctcttccacttgctatttgagaaaacacctgaacagtagagcggagattctggcttctcaacagggcaagacaccaggcctactgctgaggtca

SEQ ID NO: 10022 - DNA, 543 bp, Canis familiaris
tgtgagggaaaatccatttaggaaatgttaaattgcttttccagatgtttggttgtagcataatttcaattagtgtgtgtatgttaatgtgtaattgatagtagaaaaaagttacatttttaaaactgctacttgtataaaacctttcctcttttcccaaatactgtgggttttgtgcatagtttttacaaaccttggatttaccggattgtcttttcactgtttgtgggttttgtagaagttatgcatttttatggtagataaaatgttacttctatacaagtactcactccttttatcaaaagttaattttaatctcacagtctacattgtgctacattatcctgctgctttgtaacaatttgtggtctgtatgcctttttgtaatgacgactagatatccaactgacaattctacaaggtacaaaactcatgttaacttttgaaggtaatttagttttgtggctgggaattcagtgaagtcacatggctttcctatagaaagcagaataggtatgtataggaatgaatctggctttaggg

SEQ ID NO: 10023 - DNA, 532 bp, Canis familiaris
  misc_feature (1)..(532): n = a or c or g or t
gtatccctccactttcacaactttatgaggaagaaactaaactgaaactttttcctcctgcatcaaagaaaaagcccacggaaaatattctgnctactacacaaataaaagatgaagatctaaaatctgctatcacacaactcgcaaaaaaacaaacccaactgcagcagtcccaagctttgccatcccaagtttctccatcctattctgtaaaaaagccccaacagttatcacctaaagactttccatcccaagctttgccagcccaagtcctagtatctgaagccccaaaacctcatttcatgcagcctcatggcctaacatcagaagacatgccataccaagacatatcatccgaagaccaacaatccctaggcattgcacatcaaaattctccttatcaagaacttccagatcgtgtatccgnnnnnntgnnnnnnnnnnnnnnnnnnnngcgtnnnnnnnnacgttcaccatggacttccgcttcccgctttgcccactccaagcctttgccatctgctnnnnnngt

SEQ ID NO: 10024 - DNA, 673 bp, Canis familiaris
  misc_feature (1)..(673): n = a or c or g or t
acctgtaccatnnacggtatccctcannntacagtcagatgnnnctggcgtncctgtaancataatcattccaaagcaaggtatgacttttgctccagcaannnngagtctctaatcgtngagctggacagcaatataggaaacaggattgagagcatcactcagcgcacggcaataatagaaggaaagaataagacggctagcaccttggttgtggctgacgctagaatttctggaatctacagttgcatggcttccaataaaatagggactgtggaaagaaacataagcttttatgtcacagatgtgccaaatggatttcacattaacttggaaaaaatgcctacggagggtgaggacctgaaactgtcttgcacagttaacaagttcttatacagagacattacttggattttgctgcggacagttaaaaaccgaacaatgcaccacagcatcagcaagcaaaaaatggccaccactaaagagtactccatcaccctcaatgtcaccatcaagaatgtttccctggaagactcaggcacctatgcctgcagagccaggaacatatacacaggggaagaaatccttcagaagaaagaagttacaattagaggtgagcactgcaacaaaaaggctgttttctctcggatnnnnnaatttaaaagcacaagga

SEQ ID NO: 10025 - DNA, 580 bp, Canis familiaris
  misc_feature (1)..(571): n = a or c or g or t
actgactatctccaagggaccccttcctctgccactgctccatttataccctcaattttcacagtttatgttaatgcctaactttatnnactaccaaaccaagcaaagtttgcttctggcatcaagcaagttccaacttctataattgatttacctggaatcaacccaaccctgactccagcttggatggtgaaatttcacagaatgtaggttttgcctgggatgggaaggcaagattctttgaggacattaagaaactgatggactacaatccaaaaaatttctacaaaaataccctgaactttccactgcaggtaagtcctttgtggacatatgtaggtgagggatcaagtgaaaagaggaaggaaatgcagattaatcaacgatcccagcattgaaagaagtaccgaggacggagattgtggaagaacagtgtttgggaggcacacgtggtgattgatgggatgcatgaatctttttcagaattttagaatgtcttgaacattctggtttcatcctttctactggcaaataagttccaatgagagtttgctagatttcaatgacaaaagaataaaaa

SEQ ID NO: 10026 - DNA, 701 bp, Canis familiaris
  misc_feature (1)..(701): n = a or c or g or t
gccctgnntgagagtgggttaggggtaaactaagttggngncngngtcannnggctagcatgagcagactccccaggcatttctggcaggccctatctcaggcancannnnagtaaaagacacnctnnnngcctttagaacatttccactctggagagggactcagagattaggcagagctgcaaatgcagtcatcagtccagggcctgcaggtagatggaggtttctttttgggaactgggtcatacctgctacagaaaggacttgggacacttcggtcacacaagcatcctttattatgaaaggaagcatttaaaggaacatcacactagaaaccatcagacaggcagggaaagtagaccacttttagaaccatgattcaaggaaaaggtgattggaacaataaattcgccacttaggttttctagcactagaggtcgaaaggatgctcctatacacaattctgttttctgaaaacaaacttcagggattctcctctgcagaatctgccactttttgcatgtgtctccttgtatcagggacactaagaaacatatacaatgtcttagttgtgtgggggtagtgaatggggccttcaggaactttcaagtcatggtgtctgtgattgtcctcttctgggccacttccccctcccagctgtgagcagttgccaagtagccaaaaggaatggtattgtggat

SEQ ID NO: 10027 - DNA, 658 bp, Canis familiaris
  misc_feature (1)..(658): n = a or c or g or t
gattttgcccatcctcagggtatgggacgtgangtaacgttggcttgttgtacactnataattggtaattaacatcttttttgcttagggatgttcatttaatgtgatagctatgatagctttgctctctcacctgagctctgtctccaccacacaggatagccttcctcctgatgaggatgtgtaggtgtcagaagttgagatggcctgacctactgccaaagaggtgacagggaggctagaagctcctttgttaaattgtgtacagttctgttatagagtgcaatgccctttgtggggatgtgtgtacaaacacacatgcttgtctgaactgttccttgagtgttcccccccatccctgtgcccactgtgctggactgcatctaccccctgcaggtggcagccaagttgggaggctgttgggttgggccatttctgtcctggagacctgaactttgcacatatcagtactggggagttgctcctgctacagcatccacatcttcactttccttatcgatcactactctccccaaagcactatttattcttactctgtctgtctgtgccagtactactgtcagcacagccagtggttctcaagagcttaccagcatgggtttggtcagaatcagccatgctgtttatacatgtcctg

SEQ ID NO: 10028 - DNA, 157 bp, Canis familiaris
  misc_feature (1)..(157): n = a or c or g or t
gcaaggctggcccctcagcaaggggaagatttggagggnnnagttgtccccattttgannagnnnnnggaatgctccagcttgagtccanccannnntttaaannngnggcttccagagcaagaatgggggtggcaatgatcctnnnctggcannnn

SEQ ID NO: 10029 - DNA, 624 bp, Canis familiaris
  misc_feature (1)..(624): n = a or c or g or t
aggtgacccatgacccgtacgagtttcnncagtctccnnaanntgcagnntctacgaagagctagncttgtagntagtcttccattattttttaattttttttatttgcatgtacagagtttttgtcctgagacaaagacttccattttgtcccctttggcttgcgggaagcagccctggggaggtggtgagttgtctctagtaccatgtcggccacgcacggatccagtgtttgtgtgcatagccccatgaaccctgaagagtgggcagcacacagaagggtgtgcggccacatggggttgagccggtgtccgtgtctgagctttgagcagaatgtaaagcccgtctgtgcactggcctgtgctccctgggatgcggacctgcccacagcgggactcctacgtgctctctgccctgcccaccccctgtgcccccgcgtctccgaggcaggtcctaggggcccgcaccttcccggcccgggactggccctgtgctcctcctcctgtgccgggcgaggcctgccttctgctggaagaccacactgcctcctggccacggccacgtgctgtgtccatagacctttttattctggatgtgtttactggatgcctgtttacatttgca

SEQ ID NO: 10030 - DNA, 69 bp, Canis familiaris
  misc_feature (1)..(69): n = a or c or g or t
annnnnataancctctcctatcaaaatctccataggccaaaggactgttggaatactaatttgtgacct

SEQ ID NO: 10031 - DNA, 694 bp, Canis familiaris
  misc_feature (1)..(694): n = a or c or g or t
agccaccntcntgctttcacctgtcnnnggtcagttcatccatcgctgtnngtnnnngtctnnncatgatgccnnaacatgtggaacgtgtgctgtgggggccgtcactnacctctaacccccccgtgtctgcatgagcatgtggtctcccccggtccttgccccctccgcaatccccgtggcccggggaggtgtgtgggatgtgctgctgctgctcccctgcccaccagggcctagccagccccctcccctggccagggcagtgggggtggctccaggggcttggggaaagccaaattgccaaaactgaagttgcctccattcccatgtgggaggccaggtgtcctcacgcctctgccttctctgtcccagggggtggtgcaggagcccggggccccagcacacagccctcgccggacagagccagcggccgagccttacttgtcccacccgggcctgccggcctggtgtcgtgtgcctggtcggtcagtatttattgcctccatatgtgccgtcctctgggccccctggcctgccacctctgcccccaggctcggtgccaccatccccggcaggccatccccggacccagccaggacagctgcgggaccaagccgcacagtcggagccctcccctgtgcctccctccccttgcctcccttgttaggcctgggcctaggatgttcaggagcct

SEQ ID NO: 10032 - DNA, 44 bp, Canis familiaris
  misc_feature (1)..(44): n = a or c or g or t
gactnntgacagcagctttgcctctgtattgtgtaccagaatat

SEQ ID NO: 10033 - DNA, 637 bp, Canis familiaris
agcagatagacaagatgaaggctattgttcagaagctccgattcaattacagaagtgacagctttgagaacccagtgctacagcaacacttcaggaacctggaggtgctggctttggatttgatggaacccgagcaggcggaggatctgacactgcctaagattgaagcaatagataaaagactgggctccttggtgaatgagtttaaggagcttgtctacccaccagattacagtcctgaaggaaaagctcccaagcggagacaagatgatgaaggtcttggaagcaaaaggcccaagatggagttatctgaagaggagctgagggcccatgtcaacaagggcacgctgggtaagctcactgtgcccatgctgaaggaagcctgcagggtgtgtgggctgaaaggtgggttgaagaagcaggagctgctggacatactcactaagcacttccagaagaactgaccagccagccagccacccttctgcactacagccaggctgcctagttttgttctcatcaagttaaaatatgtttctcctgaaccaggaagagtctgcctgataaaagccaaggaccttacacttatggaccttacatttagtggagactttctgttgccatggagaccgcatag

SEQ ID NO: 10034 - DNA, 637 bp, Canis familiaris
  misc_feature (1)..(637): n = a or c or g or t
acacagactatcagtnntaaagtccagcgacagagcactaattagaaaacattcaggaggaatactgttgcagctgaaattggtggggagttcagtacttattttagttaaattatttaaaatgttcttcattgatggaaagcagttacattttgaaatgcattgtttctaatgacatttctgtagttttaaactttttaatgaatttcgcataggacaaatggtaatttgtatataaagaacttggtaaaaaatttgcttaatgtaaatataaatagtcacaattagtatagacccatcaatatatttttgataatttttcatgtatggtaaaagttacagtgacaaactgatattctgatataaaaagttttgagagtcaatgtgggaaaataaggaggtttttagattttcttaaaagactttgttaaaattttaggacaaaattttcttgacatcattgtttgatctaactttacactttgataataatgttttagaaaatgtgtgcaatcaaaattggtagttagagcctctgttaacacagacaatatatgttttaaagcttcatgtatgcctgttttgacccaaatctgtggaagtatcatgtgttaagttctccctgtctccctttgtt

SEQ ID NO: 10035 - DNA, 532 bp, Canis familiaris
cccaaggagtacagagctttagaattgcaaccttgccaatggacctgattggttttggttatgcggcccttgtgacatttggaagcattttgggatataagcggagaggtggtcttccatctttgatcgctggtctttttgttggatttttggctggctatggagcttaccgtgtctccaatgacaagcgagatgtcaaactgtcactgtttacagctttcttcctggccaccataatgggtgtaaggtataagagatctaagaaaatcatgccagctgggctagttgcaggtttaagcctcatgatgattctgagacttgtcttactgctgctttgaaaatccgaaggaactgaagactaaattcatatgattctactgtaacgggcagagcatacactttgtatttaaaagataatcttcaacttggaatgtgaagtgtcttattttacattagaaacaacagaaacactccaaaatgaacgctagtttgagggatttttttttttttaaaccaaaaactcgaccgtttt

SEQ ID NO: 10036 - DNA, 619 bp, Canis familiaris
  misc_feature (1)..(619): n = a or c or g or t
tagaangntagttgtgcccaaataaagtagctgtttttgtttttgttttcaaagtttggtttcaaattcaagggacnnnnnnnngctaggataggcttgatttnnnncaaattgagttttcatggggccacgagggtnnagtcgaatatataatgtgaactggttttctagaagattcaccataaccagctctggaacagtgacttcccagttgtgatctcaacatagtgcttctgaaggacattgtgatcttcgacgttggaacgtgctgttggaatacctggcagtgtcagtacaagtagacttcactatggtggtggtagttgattgtttactagctgtgataacccaaatggggtgaaacttgaatcttctcccccagcacatcttccctccatcctgatgtagaggtttgtgggttttattgggcagctgggaatctgctgctttaaatagtgcagcttgtgcttccacactttgagcatacttaacccagaaggcaaaaatatcttttggttctaggaagctgcccacacaggataacccggggtttaggtgatggaatagaatctgtaaggagaaaagcaaaagctggagctgatgaaggtatcctgtgccc

SEQ ID NO: 10037 - DNA, 550 bp, Canis familiaris
  misc_feature (1)..(550): n = a or c or g or t
aattgtttgggagaagtttcgtccaaatactgggtgcttngagccatttgtcttgtatttccctgattatagcatagggaaccttcaaaagatcttgtcacacgatcatcctccagagtattcagctgatttctatgctgcctacattaatattcttcttggagttttctacactgtctgccgagatttgaaagagctcagatacctggttttgtgtatgtaacagtcgtggtctggcgtctagatgaacttgaggatagtcagaagccttaattacaggtctttcatgagctactgaccttgaattagtactttacataaggggttacttttaatatttatataagtttacttaaaaagttatttaaaagagcagaaagctatttatattgcataggtaatttggaaagtaatcatttaatttttctttgatctttctactttttaattggatgtgaaggggagggggcaagaatatcttgtttcctttttagaaatgttccattaatacnnngcttttatctacatgtaagagaaagtagtaatatat

SEQ ID NO: 10038 - DNA, 621 bp, Canis familiaris
  misc_feature (1)..(621): n = a or c or g or t
atgtatcttgttcatttnnatagnacttttgaatactatgnnnnatttatcngcagtatgactagctttaagtgtttgtgcnnatacaaataagtgctatttctctcctgttcntgcagcctnnaaaaaacaaatttttttccttgcaaattatattaagatgtttttaatagatttttatcaactgtgggaaactaaccacagagctaatactctttcttagaaacaacccatagttaagaagacacaagacttactgcagaaatatttttccaagggattaagagagaaaaattgcctatattcttgagttagatgcacttgaagcaaaaaaagtgatcccaaagtagagttttatgagtttgcgcttcaaaaatttaacattcctttaaattatcttagggagtttttgctaagattcaatgagagaagcccatagtctactttattgtagataggaaatgtgcacacctgttgagattagcattaactaactaaaccatagtgacccagactggccacattaatgttcatagttgggattccatatttcctaggaaaaagaaaatcactaacctttttttgagaaaaatatttaaaatgtcacaattcagtactgca

SEQ ID NO: 10039 - DNA, 514 bp, Canis familiaris
gcacaggttttgattcatgcttgttatgttcatttttttttctttacagtcacttagtggttaagactgctggtagcttagaaagtttttaacagatagttccctgccccgacaaaaggcatcaggttaagatatgaaggcatcaagcatgttgcagtaaacatcatttcagagctcacagtgtagcccaggaattacggtatttggagtagctatggagaaagatctgaccttgcagagatcctaccttactggtgccagctttcaaaccaagtcagtgaattaagtcaacctgcaaatcctaaaaatgccaaaatgttgcatctggttaaatgatgtagaagagtttatttgccttgtttacctacccttccctgcagcgtctgcagggatgaagatagaataaatttaacatttcgtttctatcatttaaacaaaaagaatgaataattcctgtcactcaagattttgtagaaaaaagaaaccagcacaacagtaatgaaaattgcgcaca

SEQ ID NO: 10040 - DNA, 529 bp, Canis familiaris
  misc_feature (1)..(529): n = a or c or g or t
aaaaggatgnntgaaagcccaggtccagccctgcnnnctttccagagacagctggagagaaaaagccaggcnnnctgcagagcccgagctggtggcccctgggccccctctctctccttctagtcattcctttctttagccctttcacgggaaaccagaacacttctcacatcgtgccgcagacattttagcctgatgcctgagagctgcatcaggatgtgcggtgcacatgcaattcagttacaaattcacacagggacactggaatcctacagaccaaaatccactcgtcagcaggagcggtggccctgggcggagcaccagtggttttctggcttgtctgagggctgccgtgtggggcgaggagagccaggccaagggtccaggctgctgtagtccatccgtaccccatgcgtttggggacagatggtttttctttattgtaaaattgtggacttttaaaaacctgttgactaaacagtaattaatttatatttgtgaaaaatgccactgtcctagtgatttctga

SEQ ID NO: 10041 - DNA, 597 bp, Canis familiaris
  misc_feature (1)..(597): n = a or c or g or t
atcgnngtgaaatgctatttgaagatctgcttttgaatgaaattccagaaaaaaaagattctgaaaaagagtttcacatcctccctcaccgagtttttgtccccattccgggatctactgtaatgttatgtgattataaatttggtgatgagtcagctgaagaaatgagagaccatttcatagagatgttagatcatatgattcaaatagaagatttggaaattgcagaggaaataaacacagcttgtgtgagttactctatgaatactgaagcttcattggacaacacagatgatgaacaaccaaaacaaccaattaaaactgcagtaataatgaaaattcagcaaaatataggtgtgattgcagcagttgtggtcgcagtctttgctgcgggaatctcctttcattacttcagtgattagggtgggacgcagagagagcttcctgatcttccagagaacacaaagcaatcattatgaataatgaagatgcaaacagtccatctgcatttaagaccagagcagccacctctgctgtcataatgcctattaggtttctgactaaaatgaaatcaccagctgccttgtttagccctgc

SEQ ID NO: 10042 - DNA, 486 bp, Canis familiaris
  misc_feature (1)..(486): n = a or c or g or t
tgctnngtaaaataagccagacgcagaaagtcaaatgccatgtgatactgcttatatgatgaatctagtcagactcatagaagcagagactagaatggtggttgccagaggctggaggaaaggaaacagggaggtattagtgaaaggagacaaatcttcctgggtctcttgcatttttgcatgtcttgagagcaaatagattaatcgactttttctggatcatcttttcaaggatgttcatatagtgattgattttggaagacaaagatagtgtctccctctggagtgtggagtagntttgctttcaaccttgggaaatagagataattccctgctggatcagtaagtaggcatacttactgcttgttataaaggattaagattcctaacacttggggttcctttcctgtaatgcaccctatgtggagatgtcaccttgcttgttgtgcatcctgggggatttggtgcacagagagccattacaca

SEQ ID NO: 10043 - DNA, 620 bp, Canis familiaris
  misc_feature (1)..(620): n = a or c or g or t
tggncgctgccattttgctactgaacatctngcgctcacactgcttcacgcaggccatgctgagccagcccaagatggagagcctgnataaccctatggnctaccgcgtgggtctcgcgctcctgggagtgggcagcacgtttgtgctctccagcttctttgccctcggcttcaccgggaccttcctaggcgattacttcggcatcctcaaggaggccagagtgaccacgttcccgttcaacatcctggacaaccccatgtactggggcagcacggccaattacctgggctgggctgtcatgcacgccagccccaccggcctgctgctgaccgtggttgtggccctcatctacagggttgccatcctgtacgaggagcccttcaccgcgcagatctaccagcagaaagcctcttcttcccacaagaggagctnaccgcctggggccacccctctcagagtgggcctccaccagccccgaggtccaggccctgcagcgcagagaagggtgcccggccaccgctcagggttcgtgcccagcgagggccactccagtgccttggaaacctctgccttgggggccctggacatgctgtcgtccggccactgagcccccctgtct

SEQ ID NO: 10044 - DNA, 672 bp, Canis familiaris
  misc_feature (1)..(672): n = a or c or g or t
tcaganatcntctgaagaatcttttcaagatatttngnnnngatggcgtgaagggnnanntcctgatcgacattggctctggccccaccatctaccagctcctctctgcttgtgaatccttcaaggagatcattgccaccgactacaccgatcagaacctgcaggagctgcaaaagtggctgaagaaggagccaggggcctttgactggtccccagtggtgacctacgtgtgcgagctcgaagggaacagagtcaaggggctggagaaggaggagaagttgaggcgcgtggtcaagcaggtcctgaagtgcgacgtgactcagagccggcctctgggtgccatgtccctgcccccggccgactgtctgctcagcaccctgtgcctggacgccgcctgcccagacctccccgcctactgcgcggccctcaggaacctcggcagcctgctaaagccggggggcttcctggtggtggtggacgccctgaagagcagctactatatgatcggggagcagaggttctccagcctctgcctgggccgggaggcagtagaggctgcggtgagagaggccggctactcagtggagcggtttgaggtgatctgccagggttattcctccaccatgtccnnnnacgaagggcttttnnnnnnnggtggggaggaagctgagc

SEQ ID NO: 10045 - DNA, 469 bp, Canis familiaris
  misc_feature (1)..(469): n = a or c or g or t
tgcacaccntatttcagtctcctatatntgttcttccaaggaacgtatccatctctatatatattttccctctcaaaaccagaacatcaacactgctgtttctgacacttagacatcccacgcaaagccacattgaatttttgccaaatgaaaaatgcatccaacaatcaagtttctaagaaggtgtcaagtggggaatgataatgtgtaataatcgagaaaggagtttattaaaaggaagaagaagcattgaccattttttccccagaaaggagcagaaatctgtagtgagcataaggacagactatgaactctccttaaaaagcagtattgtcataaaggagaggcaccacttaagttttttttaacctaagtctagagaaactagatgagagattttatatgttaagttttttaagtgtttctgatctttttttttgggggggggggtgaacagtaagagaaagga

SEQ ID NO: 10046 - DNA, 473 bp, Canis familiaris
  misc_feature (1)..(473): n = a or c or g or t
ggctngcgagggggctgctctgtggctccccagctgaccgccctggcaaagcactgcagtgtggccttctccgccgtcccttctccagtacggggccggggggctggcctcagggtgactcggtcctgctgtccttcctgccctcaggcctcagtgaattgttcctcatttgttcagggcagcctctgatgaggtgttttcatttagctccatctgtctgtggcaccttaggcccagagaggagtcaagattcaacagagctggatagcaaggtctgtggagtaggaaaaaaaacgtttgtggtttctgggacatacattgtcccttttcatcctcttnnnagcccagcaaagtaggcagggctgccacggacggttgggtagtctgtgcactgctcagaggttcctggttatgagggtgagccactgggtcccacttccaggcagcaggcttggggctgtaccccaggttat

SEQ ID NO: 10047 - DNA, 685 bp, Canis familiaris
  misc_feature (1)..(685): n = a or c or g or t
tgtgaccggctgctgagtgagagccagagcatcaaggggctaagagcactggcaggnctggtgtacaactnntcnngnancgtgccctgctatgacatttacctgcagtaccaggcctgtgcagacnntacgggctgcggctcaggccccaatgccaaagcctgggattaccaggcctgcaccgagatcaacctgaccttttccagcaacaatgtgacagacctcttccccgagctgccattcactgacgccctccgccagcagtactgcctggacacgtggggcgtgtggcctcggagggactggctgcagaccagcttcgggggggacgacctcagaggtgccagcaacatcctcttctccaacggggacctggacccctgggcagggggtgggatccggagtaacctgagcgcgacggtcctcgccattaccatccaggggggagcccatcacctggacctcagagcatctcacccagaagaccccgcatccgtcagggaggctcgcaggtttgaggccaggctcatcggcgagtgggtggaagcagccagacgtgagcagtggctgcggcggggccagcgcagaggcctcaggggctgaggggtgcccccccgcgacagagagcacttggggagcatctcagaaggttctgggggtgagcggctgtggccaagagggttga

SEQ ID NO: 10048 - DNA, 667 bp, Canis familiaris
  misc_feature (1)..(667): n = a or c or g or t
tnnnacaaatcntagcnngcgatccagacttctatagcgnnnnnntactgggaaagacgaatcaagagtactgtgactggatcaaaagggatgacacctggnnannagctattgagatatcaattctgtctaagttttatcaatgtgaaatctgtgtagtggatacacagacagtaagaattgaccgttttggggaagatgcaggatacaccaaaagggtcctgcttatttatgatggcattcactatgatccgcttcagcggaacttccctgacccagacaccccgcctctgaccattttctcctctaatgatgatattgttcttgtacaagcactggaattagcagatgaagccagaagaaagagacagtttactgatgtaaaccgcttcaccctgaggtgcatggtatgtcagaagggattaactggacaagcagaagcaagggaccatgccaaggagacaggccataccaactttggagaagtgtgatctatgcatgatgaggattgccgcctactacctcacagatccagaaggctctgggttttccaataagctatttgtaacccttaaagaacaaaggacacaatgcttgaaccatctttttaacttaaaaccactaagacactgaaattccttgttaagattaaaattagtgtgcnnnn

SEQ ID NO: 10049 - DNA, 578 bp, Canis familiaris
  misc_feature (1)..(578): n = a or c or g or t
acctgcccaatatnntcaggctctccacatcaggctgtgtgtcaccatccagaatnnagggcagcctggcctcccctcagtcccttcggcatcagtagctataaacacattcacaaaatgagtttctgcatcaaagcccatagaaaaaatggatccatagaatgtcatcccggtttcaaagagtcaacgtgaatccatgtggtatttaggacctggtgatacttgaagtctcccactcccaggaaggcgggtaaactcgtctgggacacacatacctcacactgagctgctggcaaccaaacagaacgactgggaacagagcacaggaaaataatgtcatttccccaaatgtgttctaaggttaaagggtattcagacaaaaggctttcacggccaagtaagtttgggcaacaacccacaccagcactgcaaaggttctatggccttggatccttcaagatgctccagtgctttatgaatcctggtagacaggatgggtagcgggatcaacttttgtgtaaaaccttatggggttagtgttcagggaacaggcttacagaaaagcttgctttagatga

SEQ ID NO: 10050 - DNA, 640 bp, Canis familiaris
  misc_feature (1)..(640): n = a or c or g or t
agagaaagaaggacccaggattcctacatataagatgatagagttttttcttctgtgtacaagtgaaaactgactaatcaagaacacacctagctgtggatatctgaaacttctgctccagggaaatatggtaggaaaagatggaaaaacaatactctctgaagctccaagacacatctccactgttttcacatctttcctgaggaaaatggggttttagtttctgccctttccaaatgtacctcatacaatgaaaagtcacattcaaaagtcccattaattgttaagtaatgtttattaaataccctcaagtgttggtgatacattgatgcttccgcaaacctagaacagaagaagctacacctttaaggaaccaactggattgctgcccaatctttcccacctgccatgattgtcaaatcccactttcttacctattctccaccctcccctcccttctgttccaccagttgtagagtgaagggggagagaagtcaaaatagcactaagctgcctagaatttaaaaaaaagactttgtttttcacctaaacatacacattgtcttactctgtatggtttattggctgtgcttattacgaattctctatggtacagcctcacannnnaattttcagagan

SEQ ID NO: 10051 - DNA, 533 bp, Canis familiaris
  misc_feature (1)..(533): n = a or c or g or t
ccgggcccagacgcgcactgtnntgacagccgctgctgctgccagtcaagagcaagcccttcggcccaagagaaanntcgggcttcctgcgcgtggagggagggcaggctgcggaggttcccgctcagccccgctgcctgcccgcgtcctgctcggctgcgctgccgaggctccggcgcccaccgcctgcatcttggtggcccgactattatgagtcactggtggacatgtgacctccccaaacgcgacagacggcctcctccatcccgggctcccagaaagcagccaccagggtaaagctgctgcgaccctggccggggccacgccgaggaagggccggaggaagccgaggcccgggcgtggcggcctccgagagccaccatcgggacatcgcgtctacgtcccgccgccgagctccgggaacgaatcctgtcccagccatgtgctctgtgatttagctctttagcttgactgttgctgcagtgttcgctttgttattaattaagaaataattgaccgagaagtaactaagt

SEQ ID NO: 10052 - DNA, 386 bp, Canis familiaris
  misc_feature (1)..(386): n = a or c or g or t
tggggaggatgaagncnctgatgcagacgaggaagtggaactgatcctgggggacacggacagctctgacaacnnnnatttggaagatgacatcatcttatctctgaatgagtgaggagccgtcaccatgtggaagacattcttgataggcgagaaactgaatcagatgaattcagaacaccttcctttccctttctcccagggctgtcttttaaggaactgcatgccctgcattcagaggattatggcttagagagcctcactggaatctgagggtccttctaaaaacaataacaaccacaaaaaagacaacaggggttaggccctattctgcttcccccttctcctaggatggacagctctttcctcaaggggaaaaaaaaaca

SEQ ID NO: 10053 - DNA, 607 bp, Canis familiaris
  misc_feature (1)..(607): n = a or c or g or t
agccnntacgagctanctcctcatactnntcttttggatgacaacccggagtatngactacatggctaccagctgcatgttgatatgcacagcggtggagttttctacctgtgtggtacatttcgcaatctctttaccaagaaaggatccattgaaaatggatatgtgaagcttgttgttatacgttttaaaaataacacagaacacctacctcttattggaaaagttggcctttcttggagaactgatgttttcagtggctgcataaagagttgttctataatggacataactcttttggacgaatatgggaaacccttttggtgtctcagttcccctgtttgcatgagatcttctgtgccctctgatggccctaacttcttgggacagacttactgtgttgactatgtggactcggaaggcaaagtgcacgtggagctggtgtggatcaaagagacagaagaatacttcatcgtgagcctggtcctttacctgaagatagcaaaaataaaccactggtttgggacagcatactaagtattgcctgggggtggcaaaatattgctgctgtttgtttattttgnnnnnnntggttttgttcttggtg

SEQ ID NO: 10054 - DNA, 548 bp, Canis familiaris
  misc_feature (1)..(548): n = a or c or g or t
tggtggnnnacatccatcggcggcacctccgggtggggctcaagggacaaccggcggtcattgatggggagctctacaatgaggtgaaggtngaggagagctcatggctcattgaggacggcaaggtggtgacggtgcatctggagaagatcaacaagatggagtggtggagccgcttggtgtccagtgaccctgagatcaataccaagaagatcaaccctgagaactctaagctgtcagacctggacagtgagacccgcagcatggtggaaaagatgatgtatgaccagaggcagaagtccatggggctgcccacctcggatgagcagaaaaagcaggagattctgaagaagttcatggatcagcatccggagatggatttttccaaggccaaattcaactagttcctgtgtctgcctccctgaactcttggggctgagccaccagccgtccaccttcttttcctacccttccctgggacttgggggcctcaaggctggggcaggcatgggacccgctcaggcacaacggtcccagggcatcatggg

SEQ ID NO: 10055 - DNA, 541 bp, Canis familiaris
  misc_feature (1)..(541): n = a or c or g or t
cccgtaaaanntgaatcaattccaataagactatttnnagcnnnatatgacccaactccaacaatgagagatgtgaacaaaaaattttcagtaaggtactttttgaatctagtccttgttgatgaggaagacagaaggtacttcaagcagcaggagatcattttatggagaaaagctccagaaaaattgaggaaacagagaacaaacttccaccagcgatttgaatcaccagaatcacaggcatctcctgaacagcctgaaatgtgaactgaataggagagaaaaagaaaagcaaaaaactcctatatccattgagattaaattcagattaaagatggttgcagcttgtagggggggaaaaggccaaaactccatttacaatagtcttcctttatcttacagtgctgcatttattttatgatacaactaaatgttcttcatgtatatacattaaaaaaagcgctttctttgaaacactggaaatttcttaagctgccgtttttttcttttttttactgtacactttgatgatgagcactat

SEQ ID NO: 10056 - DNA, 629 bp, Canis familiaris
  misc_feature (1)..(629): n = a or c or g or t
gtctgtagatgtgctgtttttgagtggtggcaccgatgggcaggatgggcctacagannnagctggggcctgggttgtgcctgagcttgccagccaggctgccactgagggcctggatgtggccaccttcttgtcccnnnatgactcacataccttcttccgctgctttcgtggtggagcacacctgctgcacacagggctcactggcaccaatgtcatggacgttcacttcctattcctgcggctacggtgatggcacaggtcatgttttaggaggcacagaggtgacctatggggcagcatcctggggcagaacagggttggtctgcaagacctcactaggctttagggccccttctctccttggcctggttgtttggttgaccctcacctttcatacccagggcttctgctctgtgttcattccccccaaccagactggcagatgggagttctcttctcttcctactttctgtcatgacagcaggtacccttgagggctaggatgagcacctnnnntactttgctattcctggtcttctccctttacacggggcagcccctctgctgagctcttgagtgttttttctgtggnnnnngaaggactgcaaataaaaagaaccacactc

SEQ ID NO: 10057 - DNA, 583 bp, Canis familiaris
  misc_feature (1)..(583): n = a or c or g or t
acgagactgannaancggacatgcanctgccccagcnntatgctgtggcccggcgnnagggcctggagacagcannagctgccagcacccagtttgactctgctggtggggtggcctacctggacgacattgcttccatgccctgccacactggcagcatcaatagcacagacagtgagcgctggaaggctatcaatacctaagtgtggccaccatggctggaaggcctgcgggggcttgtggagggcaggctgagtgtgaagcccctggtgaggaggacgaggtcatgggaccttctgtgggcaggagcccacgccagccctgtcttgccctctgtgctcccaggtgtctttagccacctctgctctagctgggggctgcctccgccttccaccttccttccacctgttgtctccctgctcagcaacgtggcccacacactgatctcccagggccaggcctggctaggccagctgagggcacctcctttctccaaagcctgggcacccaggactgctctggcccttctcacccttctgcctcctccccgnnncgctttggcctccnnaaagcccactctggc

SEQ ID NO: 10058 - DNA, 631 bp, Canis familiaris
  misc_feature (1)..(631): n = a or c or g or t
gcatnnagggtgcagaaatcaacaagagtctcctggctctgaaggagtgcatcagagcnctcggacagaacaaggctcacaccccgtttcgagagagtaagctgacacaggtgctgagggactcctttatcggggagaactcaaggacctgcatgatcgccatgatctcaccaggcataagctcctgtgaatatactttaaacacactaagatatgcagacagggtcaaggagctgagcccccacagtgggtccagtggggagcagccagttcaaatggaaacagaagagatggaatccagctctcatgggtccctgatctcaggcaatttctccaaggaagatgaggaactatcttcccagatgtccagctttaatgaagccatgtctcagatcagagaattggaggaaagggctatggaggagctcaaggagattatacaacaagggccaggctggcttgagctctccgagatgactgaacagccagactatgacctggagaccttcgtgaacaaggcagagtctgtcatgatccagcaagccaagcacttctcagccctgcaagatgtcatcaaggccttgcgtctggccatgcagctggaagagcaggccagcaaacaaataagcaa

SEQ ID NO: 10059 - DNA, 519 bp, Canis familiaris
  misc_feature (1)..(519): n = a or c or g or t
agaatgtgtgagtttgtatgtgtgagaatgtgtgcnnattaataaatatcnnnnaggcatagttttaaccactgtaagagagcattgacaccatgaaatcatggacttttgaaactggaaggttatatcaaataattcaacactactctaatcaatcagagtccaggagacttgttttttaatttgatgtgacaaatagatgttaaggtgactccaatgatgcccacctcanggtgttcacatacttgtgtaatcccctctacttgaatgggggcaagacctatgagtctataacataaatatccaaccacaagaagatttttcaggtaaacaatgctttatctattggatatattagaacaatactatgcattttttggaagaatgattgagtattataaagcaaatggaaaagtatgtgtgttcaaattaaaattttcttactttaccnaattgaaaaatacaattacatttaaaatattacatgcaatgacaagtggaatacanaatactaggtat

SEQ ID NO: 10060 - DNA, 523 bp, Canis familiaris
  misc_feature (1)..(523): n = a or c or g or t
tgtacagaggaaagttgtccagtgatgtcagctggcccaaaatatgagtatcattgggcagatnnnacaaacataaagaagnntattaagtgctctgcaccaaagtatattgattacctgatgacttgggttcaggaccagttggatgatgagacattatttccatcaaaaattggtgtcccattcccgaagaatttcatgtctgtggcaaaaactatcctcaaacgcctctttagggtttatgctcacatttatcatcagcatttcgaccctgtgatccagcttcaggaggaagcacatctcaatacatctttcaagcactttattttttttgtccaggaattcaaccttattgatagaagagaacttgcaccactccaagaactgattgaaaaactcacctcaaaggacagataaaaggatgaagagctgtgcaagttgttcctcaaatgaagtgtgtggagtgtatttggattttgttgtgttttatttttatcttggtcatttttgtcttaggtttggg

SEQ ID NO: 10061 - DNA, 470 bp, Canis familiaris
actattttaaatttgagttccctgactggcgaatgcctcggtaaccggccggcccaatgggataggcaatcctcacccagaaccggaacttgctctcctttctgtactcacaaacattttgaaactggaaccgtttgtcttccgagaatggaaacaaggcagcaaagtctaagcccctataatcagaggccacctctcactttgcgtgttaacgagacccaccgtgccattggcacggaacccacagaaagatgacaaatcaggccaacagtgttgctgggtctcctgcctccaaaataaaaagttctcatttccttcagatttttgccctatcatgttctgagtttttatattgtctgtaggctcactcagcccgcagcttacatgtgtgcttttttctatgaaaaatgatgtattttactacttcctatgtacaaaagtttattgtaaattttgtgtgtgtgtgcttt

SEQ ID NO: 10062 - DNA, 508 bp, Canis familiaris
  misc_feature (1)..(508): n = a or c or g or t
annacgagccccnnnnngccccctccagccacagctccagcaccgaggacttctgctatgtctttgtggtnnngctggagcggggccnctctggactggggatgggcctgatcgacgggatgcacacgccgctgggctcccctgggctctacatccagaccctgctcccgggtagccctgcagcgtcggatggccggctgtccctgggagaccgcatcctggaagtgaacggcagcagcctgatgggcgtcagctacctgagagccgtggacctgatccgacatgggggaaagaagatgcggtttctggttgccaagtctgatgtggaaacagccaagaagatccgcttccgcacgccgcctccctagggtggccgcccctgtgctccccgccctgctgctcccgcgctcatgccgtgttccctgctgtggataatgtacatcttagtgtatattttatttatatgacagataacactaaattgtgatgtttgttacagagcttttat

SEQ ID NO: 10063 - DNA, 574 bp, Canis familiaris
gctcttcaatgggagaaaaacaattagaaaattagcatcttgatccaaggaaagctgaataggggaaacagatgtctcttacctaattctgtatttttcactctttcaggtgagaaagaaagccttttgggaactggtaggctttatgtatcacagtagtattgtcttgcaaaccacagagaagtgagtctcagacaggatggtcagtagaattgccccagaaacttctagctgctgcaaacctaggcctagagttttttgttttgttttgttttcttttttgtttttttagaagttgcttttttattttttaggaaacttaaatacatttaaaaggtgtgtgaaaaaaataaaataaaataaaaggtgtgtgaaaccaaaaaatttttctttgaacagtgtcaattcatcataatatttgctctggattttgctagctactagggctacagaaatgaaattccacttcttaacatttattttaaaaagtaaatattataagagtacaataataggttagaaaggtgttcactgtagcatttattataatggcaaaacattggcaacaatctga

SEQ ID NO: 10064 - DNA, 564 bp, Canis familiaris
  misc_feature (1)..(564): n = a or c or g or t
acagnntctttcaccctgctttgtaannactcggcangagagagcatgggcaggggaggagacagcgtgcaagtcgcagtagtccctaaagataagaaagacagtccggtcagaacgctggtacaagataacaaggatgggtcgtactacatctcctacacccccaaggagcctggtgtctataccgtgttggtctgcatcaaagagcagcatgtgcagggctcaccgttcaccgtgaccgtgaggaaaaggcatcgcccacacccaggtgtgtttcactgctgcacgttctgctccagcggaggccagaaaactgctcgctgtgcctgtggaggcaccatgccaggtgggtacctaggctgtggccacggacacaaaggccacccgggtcgcccgcactggtcgtgctgtgggaaggtcacggagaagtcggaatgcacgtggacaggtgggcagagcgcaccaaggagtctgctcaggactgtggccctctgacgccttcctggacaggtggccagcctgcgagagctgcagccagagcaacttcatggtaccggaggaccc

SEQ ID NO: 10065 - DNA, 688 bp, Canis familiaris
  misc_feature (1)..(688): n = a or c or g or t
ctcatgacatcanntnngtctgtaacaaatcaaaatgtgactccttttgggatgctgggtggccttgttccagtgaccatgcccttccagtttcccttnnagctacttggctttggaacggacacagctggagtgacaaccacctcgggatctacctcagccgctttccaccatagcctaactcagaatttactaaagggtttacagccaggagttcagcatgcagcaacactttcccactcacctctgcctacacacttacagcaaacattcaatgatggaggccaaagtaaaggggacactaaattaccacggaaatctcagtgacttcccagcaagcgatggagatgagacactcagctggctgatggaatctacctgatgggaaagtcctcatgtggtcatagggctgctgttctgtcgatgtttacattctctcgtcccaagcactgtggtgaggaggaaaaaaggaaagaaaacatgacttgagtaaagccagatgcaggaggaagaaatgcttttgtgcaaagttagtgacctttggtctcctctaaagaaagacaagttaccatataaactgacttgaaagagactcagttgtcaaacccacagaagtacaaatttgatttttccccggggaaggaagaaggaatctgaggatttgggtatattccatccatcctggggg

SEQ ID NO: 10066 - DNA, 641 bp, Canis familiaris
  misc_feature (1)..(641): n = a or c or g or t
caagactcctggaacctnnnaccacatcacnnagcaaattggaatgttcagcntcaccgggttgaaccccnngcaggttgagtatctggtcaacgaaaagcacatctatctgctgccaagcggtcggatcaacatgtgtggcttgaccactaaaaatctagagtacgtggccacctccatccatgaggctgtcaccaagatccagtgaagaaataaccacccgaaccagcaccaccaaagcggccctctgtcatgtgtgttccctgcctgcacaagcctcgctgtgtgtatcacggaaagagactacggaggactagaacgctgctctggtgaggtggcctctgttcaagctggccccctacaagaagaacatccctcgtaaagaaacgggggcctaggatcagagccccttaggaggccagagcaaattaaggtttttatttaagaataaaaaggactttgatcatgacacctagatatctcgctccctcactagaagccggaatgctgcctctcttgctcatgtgcttttgtgtattgcttgactctgcacaaaatcttgccccaaagatcaagttgtctgaagagccaactgtgattgtgagtgttggctgtgtcattaaaacttgtcatcnnnnnnn

SEQ ID NO: 10067 - DNA, 608 bp, Canis familiaris
  misc_feature (1)..(608): n = a or c or g or t
gggatcaaggagtcgtcggacagcacccacaccaccatagaggacgaggacacaaangcgcnnaagcannnngtcatcaagatcacggagcagctcatcgannnngtcaacaacggggacttcgaggnntacgcgaaaatctgtgacccaggcctgacctcgttcgagcctgaagctctgggcaatctggtcgaagggatggacttccacagattctacttcgagaacctgctcgccaagaacagcaagcccatccacacgaccatcctgaacccccacgtgcacgtcatcggggaggacgcggcgtgcatcgcctacatccgcctcacgcagtacattgacgggcagggccggccccgcaccagccagtccgaggagacccgcgtgtggcaccgccgtgatggcaagtggcagaatgtgcacttccactgctcaggcgcgcccgtggccccgctgcagtgaagagctgtggccggcttggcgggacggactcgtgttgggagccccgccgtccgcggcccgcccgtcgcatgtttgtgtctctgcctcgttccccccctggtgcctgtgtctgcagaaaacaaagaccggacgtgatctctttttca

SEQ ID NO: 10068 - DNA, 610 bp, Canis familiaris
  misc_feature (1)..(610): n = a or c or g or t
ctgtttccccatcgcncactctctccnntctggtgacctgaatcagtgtattccctacagttaagagactgtttcttggtnnctctttctctctctttcttccttttctcatttcttatgtttcttaaattgcaattttgtgaagatttgatgacataattggagtagagaaaaaagtacaaaacagatattcctggcaagagagtctgaagaaagtatgaagatctggatgtgtggaggccaactctttataatcccctgctcccgagtgggacacatcagtaagcagcgcttttcaaaccaacctgagcttgtaaaagccatgacatataataatctcagattggtgcacgtctggctggatgaatacaaggagcagttttttttacaacagcctggtctgaaatctgttgcctatggcaacattagtgagcgtgttgaactaaggaaacgattgggttgcaaatcatttcagtggtatctggataatgtcttcccagaattggagacatctaagggcagcctatgaaaaggaaacaaatcattttcattaatgaaggactagaagtccccaagatcgtcaacagagagaagagtacaagtttggaac

SEQ ID NO: 10069 - DNA, 672 bp, Canis familiaris
  misc_feature (1)..(672): n = a or c or g or t
anctcactgacntgcaggtcaccatcgagggccctgaggggaccccttatgccnnaggcntgtnncgcatgaaactcctgctggggaaggactttcctgcctccccacccaagggctacttcctgaccaagattttccaccccaatgtgggcgccaacggtgagatctgcgtcaacgtgctcaagagggactggacagctgagctgggcatccggcatgtcctgctgaccatcaagtgcctgctgatccaccccaaccccgagtcggccctcaatgaggaggcaggccgcctgctcttggagaactacgaggagtatgccgcccgcgcccgcctgctcacagagatccatgggggtgccagcgggtccagcagcgggagcaccgaggcgggcagggccctggccagtgggggtgccaccccctccactgaccccatggccccggggggcccaggtggagccgatggccccatggccaagaagcatgcgggtgagcgggataagaagctggcagccaagaaaaagacggacaagaagcgggcactgcggcggctgtagtgggtttttctcccggttctacccacccctgaccccaacccccaactctgtctctaagttatttaaattatggctggggtgggggagggtgtgggggcactgggacctggatttg

SEQ ID NO: 10070 - DNA, 570 bp, Canis familiaris
  misc_feature (1)..(570): n = a or c or g or t
atcacgcccgcaaggtnnacgcagagagcgatggttccactgaagagacggatgagtccgagacttgannagtctaaagggtcctgtccacaactccctcatgcccagctccccccacccctgccctttgggactcccgccgagccccctctccaactcctgcgccctgctgccctctgctggtgacaagccttgaataacagcccaagcccaaagaccggccagaggggtctggtatctgtcagccaagtctagcagtgaccctgacaagtaacagcctacccttcttggccctgtctgcctctgcactttagtcaggacccaagctgacagcagactgagcagaggccgtgaggaagatgatgtttgctgacagtccccacacagcacctctagggagaccatgaataacggtgcaaggctttgcatggtcaggggtgacacctgtggcacacatacagggtggccataaacacagtggccttctcctggagggagagccattactgtgacaggacaaagggtaggcaagaccagtccactttcaaaacctgctccaagtctcctctg

SEQ ID NO: 10071 - DNA, 633 bp, Canis familiaris
  misc_feature (1)..(633): n = a or c or g or t
ttccatnngctcactgccntnnaatcaacaggctggnngctggntgcattttctgaaacannaagtannaatcactgtnnnncagaggnnnctagcaaangaggggtaatgggaatccagcccccttaggactnnagaaagagctgcaattaaccaggttgccttttcccactctagctgccccaggggggctaggttgtagaggtgacaaggaacccactgtactaatttgtgccattcttaactttggacttgtctggtaaaggagagagggggccgaaccagagtgccaggagctgacaggcttatctcccctgatccagtggggccaggtgcctaccctagaccaggctggcctagcagtgtccaaaggctttttagcccagatggtgcaaagctggggctagcagatcttcacccgcaccctcacctgtgacacccaagacctgcccgataccagattccgggcagcattctcccccatgccgtccaacgaccaaaggccctgccaggtatgggccaaggcagcaggtgtgtgtgaaagcgatgtggcgacccgtggactgcagtgtgcttaaccagctcacctcccttctcttagcccaagcctgtcccttgcacaaaccacgttgc

SEQ ID NO: 10072 - DNA, 698 bp, Canis familiaris
  misc_feature (1)..(698): n = a or c or g or t
tgtcatngncngaaagaaggnntgacggtgcaagaacgcttgaagctctttgaatccagggacttgaagaaagantnnncgtgtcccgttcaacttgaacacacacacccctcccagcntgcggcagcactaccccagcgctgctttttgtctgtacctttattttttattattattattgttgttactgttgtcatcattaactgtaggtatggatgcatgaaagaccgatttaagggttgttcacaccgttccctgctgtgttgattccagcttcctatgtgtttgtcaaagctttttttccatggtattctcaaatcagccaagcagcggggccgggagagctgtgtgctcctggccgggatctgcacagagcccctgcccactgcatccaccgcactcaccgtcagtattaaggcccagcagcctgtcgataagctagctcgtccgctgagggcactgtgcagagtcggggcctccagcggctctcgctttgctgcgtgtgggcgccagggggggcagcactgacaactcactggcctgcgggaggagctggaggagcaggtggggaggcgtggcttataacctccactcaccacctttggtttgggagaagaacagtgttttgtacttgtcccactaattcagcttagagccacagcccagataatcgtggggaacctttcacaacctggaaa

SEQ ID NO: 10073 - DNA, 563 bp, Canis familiaris
  misc_feature (1)..(563): n = a or c or g or t
ttcagnacgccagcggtgcctccaggacatctnggcagggggctgtcccctnnngccagtgaccctgcagctgacccnnnngacctctctgcaccaggcacacaacctctttgagctgttgaaccttcagtccctccctgtgacgtctctgggcagagctgtgggctctgtgtcttgggtggagttgaagaaagcaatttctaacctgacaaacccgccagccccaaagtgagccagcccagcaaatgaaacagggtggcccggccgccctggtgaaggagatggggcagggaccctgcgcctcctcccccatcaccacagcccctcccctccagcccggctcagctcctcctcggggaagcaggcagcgctnnncatgctccatcctgggtggcacgaagcgctccatcccgcaaaggacaaatcccaccctggaccgagcaggatgcgagaccgcagaaagcctgtggacactgggtgctcattgaagagtcaccaagtccacagtgaagacattggtgtacggctgtcaccgagggtngnnnncagatgccctgtgaggg

SEQ ID NO: 10074 - DNA, 681 bp, Canis familiaris
  misc_feature (1)..(681): n = a or c or g or t
aagatntggatcatttaaaagatgaaaaagaaaaattgctcaaagaaaagggcgagaatgacaaaagcctccatctactgaaaaaacaactcagcactttgtatnntgnngtcttcagcatgctccgtgatgaagatnnnannnnnnactctcccagtgaatactccnngcagcaaacaagagatggcaatgtattccttgtgcccaaaagtaagaagccagatattaagaaaaactagatttgagaagaagtgactttttccgagctagtgggttgtttgttttttttttgtactgttatactaaaagctcctactgtgatgtgaaatgcaaaaatatactttataagtaattctatgcaaaattatagtcaaaactagtgtagaaaataatataaactttaaaaagcattaaagtaagtcatcagtatgctgaatcagtagtttcactttaactgcaaacttaatttcttacaacaccatttgggctagtttctgtataagtgtaaatactacaaaaactttatttatactgttcttatctcatttgttacgttcataggtttatatgatatgacatctggctaaaaacaaattgttgcaaaactaaccactatgtacttttttataaatactgtatgaacaaaaaggcattttttttatattaaattgtttagccctg

SEQ ID NO: 10075 - DNA, 667 bp, Canis familiaris
  misc_feature (1)..(667): n = a or c or g or t
cacgaagtcgtggtccatgaactggaagacctggnnntggattgtgagctcagctggcatcgaatctctgcaggcctgaacaattacacattttacagggttttagggagcaacagcttgctgctgtccgtggggaaagagcccaccctgaccaagaccatggtgagattagaagatgcaggtacctaccgctgcgagttggccaatatgaaaacctcccgtgccgcggtcacgcattttcgtgtcagagtgctgccccaaagagccggtggagccggacggtcgtcaccaaccactactactgctaccacagagtacgaattctctacggaatgggatctctctctgctcttcccaaccgccctggctaatccgtcagagtgtccgaagtccgaggacgttctgagaggccgtctgataggactgctgctctggggcttactggtgctgttaatcgcctttgtgaccgcgatcctttgctttcgacctgggaaggtgatcaattacataaaggcttggaggaccaaccagaaggaggctgctcagcaggcccagactgctatggagccccaggctgccctggagtcccagggtgcccagaagccccagagtgcccggaagccccaggctgccccgaagcccagtgttccaaagggaaaactctcgg

SEQ ID NO: 10076 - DNA, 580 bp, Canis familiaris
  misc_feature (1)..(580): n = a or c or g or t
aaggtaccagtcggtgtggcatgcagccaagatgtgctatgtaactacgtggtcctgtttatnnaaaacacataccatgtaaccatggtgcttctgttcttagtttttgaagtggacattccttacaatgatgactttctcaggaaatatattttggggagataggacaaaggatggtcaaagtgcctgggaccttagctgggtcacagttacgatgtcccagactaagtgtgtcacaggcttctgcatcaggagcatagcagctgaagatgccataagtagttgctgtggcgcatatacagaacatggagttcgtgatgacactattcatttgcaccctaaaatattgtgcttccaaccctgtcttaagctaccaggccagaaggggtgaagatggaatcatggctttggtgcctattttcattcccagcagggtgaagaaaggtttaaaataaggaatttattttctgtccacccccttgtctctccccgcagtctttacataggagaatgtcaagactttctgaaattattgttttggttttaaattggatattgatttttttacactgactttgta

SEQ ID NO: 10077 - DNA, 587 bp, Canis familiaris
  misc_feature (1)..(587): n = a or c or g or t
aaaaannnagattgctactgctacatgacnngtcntgggacaagtttgaaaattcaatagtgtttgaactgctgattatttggattcccttttttttaattttaaactttggcacattgctctatctaaacctggtggggagaattctccccagtgtctcacggagactcccaacttgcaactgtgccctccacgctgtcccatttcttctgttctcactctgatagcaagagtgcagcaatgcagacggttactccagctctggccttctatcccctttctcactaaatcacttatgaccggaggatctcactatcccattgtggcataggaactgatgccactgggaaggaggtacccctcaccatttttatttttaagcatggagatgttggggagggacatgcacacaatatgaaacacaatgcattacagccgtagtgtaaagcagccactgtgaatttctgtgttggaaaggagggagggccgggcagcagcttcaaccacaggatggggactgtggaggacagagcagcagctcatttccnnngcccgttttggctatgagagacctgtctaaaaaagaa

SEQ ID NO: 10078 - DNA, 598 bp, Canis familiaris
  misc_feature (1)..(598): n = a or c or g or t
ttccccgagtaacccaagtagaagacacagagttcaaccaaacagactattccatccgcatcagtaatgtgtcacccaaagatgtgggcacctattactgtgtgaagctaacaataggccatcctgacatgtcgtatgtatcaggttcaggcacctatgtgtctgtgaatggaaccacacatgagatattccaggtgcaacaatctgagatgacacagactgtatcaattggagagacagtcaccttgagttgcagtgtaccagattcattcccaaaaggacctgtcttatggttcaagggatctgggccaagccgggaattaatctacaatttcaaagaaggtctctttcccagagtaaaagaaattggacacatcaccaaagctggcaacacagacttttccatccgcatcagtgatatctctcttgccgatgccggcacttactactgcgtgaagttcaaagaggggaaacctgacagagagttccagtcaggtccgggcactgaggtgtttgtgactagttgagtttgtctcctccacctcctatcatgagctatcatctcagttaaccaatncttcatttattgaattactag

SEQ ID NO: 10079 - DNA, 665 bp, Canis familiaris
  misc_feature (1)..(665): n = a or c or g or t
acttgtgtnctccaaaaagtnaccacttgaacatacagctatttaagcatgaatttaaattagttagaattaaaaactgtttctttttttattattttaatttcaatttgttttgtttggttttttttaaggttttttatttattcatgggagacacacagagagagaggcagagacacaggcaaagagagaagcaggctccatgcaggaagcctgatgtgggactcaatccctggtctccaggatcacaccctgagccaaaggcagatgttcaaccgctgagccacccaggtgtcccaaattcaatttgtttttgtttgttcatttacatttttttaatttaaattcaatttgaaaaactcagtttctcagggtgcctcgccagctcatgcaattcttgatctgattcatgagttcaagccccatgatgggtatagagattactaaaaaaaaaaaacaaaacaaacaaacaaaaaaagacgacaaaaaacaacacaaaccgttaaaaataaaaactcagtttctcagtcacactattcacatttcagtgcttgtttggccacatgagaggacagtgtatctataggacatttccattattgcacaaagttgtattgaacagtgctggtctacacggactgtaactttgtttctcagggagagta

SEQ ID NO: 10080 - DNA, 700 bp, Canis familiaris
  misc_feature (1)..(700): n = a or c or g or t
gggggtgtgatgtgnnncccacagatgccnngtnnagcatacccatttgtnntctannnacccccacannnnnnntatngacccccnnnggtnggatatnnannctcacaggnannatatggacnntcgcaggcaggatacagacccccactggtgggatatggacccccacaggtgggatatggacccccacagggaggatacggacaaccacctggagtatatggaatcccgcctgcaggatatggagctctaccagctgggaatgaagcttcagcatctagaaatgaagtcctcccagctgcaaatgaagccccacctccaagatatgaagttccacttgctagaaatagagttgggtctggcaaatatgtggtacctcagccttctcagtatgacacttctcttccccctgcctcatcttctgaggcccgtccaccatcttctctgatataacccttgaagactcaccaagcaaaatggcacccaacaactgaataatgataataaggcagactcaggtgccaggcagtaggagatgtttccgtgcacatggtggctcaatcctctccagacatctgtgaggtcctggttctcgttagaaaacaggcctccttcctgcctatgtcctgaggagaaaagagaagctaatgtaaccgaagaggctggggttaccctggctttacaccctggattaaag

SEQ ID NO: 10081 - DNA, 483 bp, Canis familiaris
  misc_feature (1)..(483): n = a or c or g or t
agagaaaanctctctggttttccagttggagcgcctnnnncagcaggtgnnctctgccagcnnaagtaacagtaacgggtcttccattaatatgtctgcagttgacagtggcgaaggcacacggctccnnnatgttcctgttctttttaatgatacagaaatgaatttggcaggaatgtatggaaaagtccgaaaagctgctagttcaattgaccagtttagcatccgcctgggaatttttctccgaagatatcccatagcgcgagtgtttgtcattatatatatggctttgcttcacctctgggtcatgatcgtnctattgacttatacaccagaaatgcaccatgaccaaccacatggcaaatgaactgaacccagttgtttcagtggtttgttgtcttttttcaaacttgggatctgcaaaaggactagttgcctaaaattgctgaggacagtgcacaaggttatttcatcactacaagc

SEQ ID NO: 10082 - DNA, 553 bp, Canis familiaris
  misc_feature (1)..(553): n = a or c or g or t
tcngcagcatagactgggacctgtnnnnnaagaagcaggccctcccgccattccagccccaaataaccgacgagtacggtctggacaacttcgacacccagttcaccagcgagcccgtgcagctgaccccagatgacgaggacgtcataaaaaggatcgaccagtccgagtttgaaggttttgagtacatcaacccgttactgctgtccaccgaggagtccgtgtgaggccgtcttctctgtcatggacacgtctgtgaatgaccccttcactctatccttaaccacagcgcatgcatgccaggctgggcgcaaggctccaagtgcggccagggagggatacttgccgccgaccccgtggacgggggcgccaagcgggcgcttctcatagcggaacagtcttgcgtctgggcccgcgcggccagctttgtgctggaggaatttgcttcttgtgcctgcgccgcggacaacccgcggtgaccgtgtccaagggagaaactgccccacgatttcgaaggtgcacactttccacagaaacagaactgacctgctcc

SEQ ID NO: 10083 - DNA, 604 bp, Canis familiaris
  misc_feature (1)..(604): n = a or c or g or t
tcccagcagtgatgtatgggggatctcatacccatttttgtatcatttnnnnnnagacaagaactttgatcattgcttactaggnnnncaatgtgttgttccagaactgaggcttcttgatttctttaccactgtaaacatgtgcatnnacaaatcatggaacacaggtgttcccaaactagttgagactttggtcctcttgattgtacacttctgtgtgctccagccttgtcagttgggggacctcagatctatttgagatctgggtacagttaacagccagacttggcagggacccccccttcctgtgctgaaccagggctgtccttgtgttttggtaggccttacagatcacttcatcctgtagccacttcttaccagagcacctctttggctggcgctgttggagggatgcttctcttttatgtgtcacagaacaaacactagtcttgcatatccttttttgcacttttaaaattaatttaactccagtttggttgaaaacttcctaagggagaaaattcagtgtactggtttcctatagataagtggatgtcaaactttaaagtacagaaaaggtggtacctacatttagnnnntagtc

SEQ ID NO: 10084 - DNA, 650 bp, Canis familiaris
  misc_feature (1)..(650): n = a or c or g or t
cgtggcaatcgagtattactcccagctgaagaccgtgtgcgtngagatgggtgnagtggagtctgttttttgaaaatgtgcggcgtggctgggcgtggagcgaggactggatctcaatagaggccgtacagctgccttctgttccaaacccagaattgtgtctttcgggataagagagtggcctcagtgttcttcatggctcggtcccctccctaaccgagaatgtgcttaagtgccttttagatactaatcaggaaagctgcgattgtccccagagcaaattttctgtgaaatctttaacacacttctggagaacgggggcggggggcagggttttgctggtcccacagatctgacccactggcagtgctcagccgccggcttcagcgaactggctcgtggttcggttcctggcggaagaagccgagatgcttttctgctcattgacgtgtttaagccctggccccttgtcatttcattgagaaagctgacagtcgggagcgagatgacagggtcacgctctgtgtgaggcttaccctaccagagtaagcacctggtttccacttgcgccagtggaggagaccggcctccagcccttgaacgacagcctgctctctttttaaatacaccaccgagctgtatgctgccac

SEQ ID NO: 10085 - DNA, 576 bp, Canis familiaris
agattctgttaggatttctgtgcatatagtgtagtaaagaggtatcattcaggggtgaaaaacaaagagccgttttaacaatgttgagtacatttggctgttctacagcctttttcttccctccccaaagaagttctgtttgcctaactctcaaactgttggggtgtggtacattcctttaggaccaattaaaacacaactttggggtcagtaatatatttggctgactctggttcagtattctcttaggtcgttatatactctcatgtacagttacaggaaattaaaatgttaatctaaaatgagttcagaccaataaaatcaaaggaaatacaagttgaattccattacttctgtaagttgcttgctattaaaaaaggtcaagaggccaggttgcccaccagcccgtgcactgttctgacactttccctaggaggaaaacatgagtgatgatcaaggtggaggcatgactagaggaggttgttaaggatggtactcatgtgtcttgctctctctgccgtatgcctcagtctggttaaaaaacttctgtactggcgaatggtggtatacagtgtg

SEQ ID NO: 10086 - DNA, 554 bp, Canis familiaris
  misc_feature (1)..(554): n = a or c or g or t
cagaaacctttgtatgtaaggaagatgctgctacgcgagcaccaaagatctggggagtatgtgtgttactgaccacagccctggtcctccaccggagcaggctggatcccggagctctcccccacggccccctgccgccaggccagggcatggatggcctcctagcctcgnngctctgtgccgggggtcttccagccccttaacccttgcgtagcaactgtgtgtagcttatcctcaccctggatgcaacatttctggatgtgcctttcaaagctctgagggatgggagaacttgagggtgaccgggaaaccccctgcctggggcggggctgggttccgtgactccacttggtcagtgcagcccgtcccacacaactcagtttaccctagctgtgcctgtgccttggctcctgactgctgctgcgccagcctccctgcttcccgaagctctcctggaggaggaagttatacccaggaaggagtgctgggaagtaggggcgaggctgggtctcgggtttggtctgtgcatctatgactaaatgactgttaactgg

SEQ ID NO: 10087 - DNA, 587 bp, Canis familiaris
  misc_feature (1)..(587): n = a or c or g or t
agtncaatggggcccagaactgagtcgttggctccccttaagtggggggatgccgcccctgctccttgcctctctcctctactctgcttgtctctctcccctgtgctggggccctgtcctcatgctgccccatctcgagggcttgggaggggtccttggatgggacttgggacccctggtagagcaggaggggaccattccagtccctgcctccagtgtcattccggcccgtggctctgggacttgggggtttcagccctgagatctgggcgttgcctccggttggcatccatcctcctgtctcccagccctagctgctctgctccctcaggaagcagcccccttgcttccccttctgggcaacttccctgaggacagaaacttgaaagcaaacaaaaaccaaagtttctggtgacttgtggctggaggggccttcgggggtagacaagagtgtcagcccctatgctgcagcctcatgccccttgcctcccaacttgggcctgcccttggcctcagggtggtgcccacagctcccctgctgtaggaaccaaattgcagactgtgctgccattaaatgagaggcnnnn

SEQ ID NO: 10088 - DNA, 559 bp, Canis familiaris
acttctgtcctctctgtgaagaaagattatcttctgcaagtcaaccagagagaactcctttcctccaccaactttgagcaaggcactatagttactccagtgcttgaatgtgtactttctctatatgagctggatcttttccacggaaactttcctgtagctgctccagatcttcactaaagtagtaacttgaatcatgtttcatatacgttgctgtggtttggttggcgcctgtcgtaagagagcacagagccccattagcactctggtgtcctactagctccctccttattgtcctagagttgagtgtttatattctccccgggatcctaagctccttccgcattccagatacagccagtgtccactgctactctttgtgaccaaacaccatgtgtttccaaaccaccgactaaggcctgggtagtctggatgttgaagacactggcagagcgtgtctcaataattcagtcctggggcccttcctctctcatgcgtcctccctccctctgcgatttcaacctctgcgttcttccatctggtctaagtgcggccactc

SEQ ID NO: 10089 - DNA, 662 bp, Canis familiaris
  misc_feature (1)..(662): n = a or c or g or t
gcgcntccccggcacnnactnnnnnnnnnagctgtctgtgactcagagatttttactgcagtagagaactcttttttcccctttttctttctttctttcttttctttttttttttgactcggcatcttttttaaagggaaacgtggcccttttaagtgctggaaaccgtgcagtgaatggcactgtctctttggcagtgcagtgcagactctgtgcgtgctctgaaggcaaggacgggccgcggggcgctcctgctgtttggctcctgaaggatcacacccccgtcgagtgctcggttaggaggggatattgttgaactgaggcctcccactcaaacctacaaaaagcactgatcattattttgctttgttagcttgtaggcagaacatatgttttctcagctctcccaagactcgtcaggcctttgtggagaagttttctcttaccccttggttttttgtttctgttctttcataggaaagactatataaatttgtaaatcctaattcaaagacttcttttgtgtgagggcattgagtttgatttgttttcccttttggtctgggttgtgtggcttttggggtgatgtgtgtgtgaggggcggggctgtgtgttttttaattttttaaatatatattttggtgctggttgtggtgagcgac

SEQ ID NO: 10090 - DNA, 673 bp, Canis familiaris
  misc_feature (1)..(673): n = a or c or g or t
catctcttctgctgngaaatcccagttcagattgaaggctagtgctgtttaggccagtatgtccatctgggggtgagagagcacaagtggagggagggcaggagaaatccagtctaacctaaatcagtgccataagatgaaaggaatttccacaccaccattttatgcttctcagcctccagaaggttccagaccctgtttcctgagagctcagaactattgcccttgtaatatcttctttgaagggttagagggaagaagagagagggagggataggcatgaatttaattgtcctcagtgtttcttgctgttggaatacggagggtccagcgggtcaggacccaaatgaggctgcacagggcccttggataatttgccctcgggtgatcagtctttgcagcggaggacgggttcccaacctccctcacctcctgggatattacatccgcaagttcctcatctccaagtgcctccttgagttccgtacattgggccagcaagtctgctgacctgtgacagcacctccagctctgctgcttcaacaacagtgactggctgtccagtggtgcccagcatgtcaatggaggggacatgctcaaccacagaaactcacgtctgagtggccagttctctatagttctctcctgtctccttttnnnnnnaaggtggttt

SEQ ID NO: 10091 - DNA, 547 bp, Canis familiaris
  misc_feature (1)..(547): n = a or c or g or t
caaagaatgaggtcagaaactggatgaatgtgattggnnnaatttnactnncagaaattccatctccccagtctgctcttgttctnnnaagtttgatttccacataaaggtatgtggaatatgnnanncctcgagaggagtaacaggggatcagagctcaagattgctctgcccaatttccaaagggcagtaagcttttgttcctatttagctattagcaaccctggctcacttgtacctgctactgcacattctgtacatagacttgctaagtagtaattgtcaagtttcagaaacttctgtgaaattcatctgtcttacagattcacactgccaaaacatgccaactatttggcttatttgtatacagatattaccaaagtcatatataaaagctannctacttgtaaaggtgttactctggtcctaggtagtagtgtcttcctagtcatatcggttgtgtttcataatctgagaagtatatatattttgtggtaaaancgattatatatcataaagtatgccttacagttttaaannnnnntat

SEQ ID NO: 10092 - DNA, 663 bp, Canis familiaris
  misc_feature (1)..(663): n = a or c or g or t
tgtatctancgcctgctgaaggnctactgccgnnagcagcnntattacctgaacctgattgagcttttcctccagagttcctaccagactgagattggacagaccctggacctcatcaccgccccccagggcagcgtggatctcagcaggttcactgagaagaggtacaagtctattgtcaagtataagacggccttctactcattctaccttcctgtggccgctgccatgtatatggcaggcatcgatggggagaaagagcatgccaatgctaagaagatcctgctggagatgggggagttctttcagattcaggatgatttcctggatctctttggggaccccagtgtgacgggcaagattggcacagacattcaggacaacaagtgcagctggctggtggttcagtgtctgcagcaggcatctccagagcagcgcaaagtccttcaggagaattatgggcagaaggaggcggagaaggtggcccgagtgaaggcgctgtacgaggagctgaacctgccggctgttttcacgcagtatgaggaagacagctatagccgcctcatgagcctcattgagcggtgcgcctcacccctgcccccagccatctttctggggctggcgcacaacatctacaagaggaaaaagtgacctagagacggc

SEQ ID NO: 10093 - DNA, 574 bp, Canis familiaris
  misc_feature (1)..(574): n = a or c or g or t
agcccgggccaaggaggaagaactgcgtgagagccgagcccagagggcccagnaggctcgtggggaccgagggccagagncagccagggctgggcccagcgcagagcacccacgaggagcagggagaggcagnntctggcgctttggtgatgtgccctggccgtgccctgggggaggggacccagaggccatggcagcagccctggtggccaggggcccccccttggaggagcagggggctctgaggaggtacttaagggtccagcaggtccgctggcaccctgaccgctttctgcagcgattccgaagccagattgagacctgggagctgggccgcgtgatgggggccgtgacggccctttctcaagccctgaatcgccatgcggaggccctcaagtgatctagggaaagagtgagaactgcagggaacacagtgttagaggcagggccataggaaggggaaagtcaagtatggggatgacgaggaagaggccaatgccacaggatgaaggatatggggtgggagcaaaatttgtattgagtgggagtggggaggatatgggccaccaccact

SEQ ID NO: 10094 - DNA, 600 bp, Canis familiaris
  misc_feature (1)..(600): n = a or c or g or t
gcctgcctttacnagtgttatttacntgtctactacaccagcnnnnnnaatgtcaaatcttttttgacttttggtttaatctgtctatgcaacatgtatctctatgaactgcgcaacctgtggcagcttttctttcacgtgactgtgggagcgtttgttacgctacagatctggctaaggcaggcccagggcaaggctcctgattatgatgtctgacaccatccttcagacatactgccctggcttccaaggaaaaaggagggagcctatcttaactgccactgtgatgaagaaactattcaccacaatcaagaagctctgctttctttctctccaactatcctttttgttttaagtcagcatggcatgcctgggagcatgcagtacctgctaggcaaactcctcatgttagccatgagattattattattcagaagaggaggagacttctctctacagggccacaacagtggaagaacagtcagaagctactggaagacttggccagcagtcctgaatccttctgaagagttcaatcaaaaaatatgtgtggtacatgctctgaggaccaagcaggaactctacaacctgggtttgcct

SEQ ID NO: 10095 - DNA, 676 bp, Canis familiaris
  misc_feature (1)..(676): n = a or c or g or t
gaagatcatgcagagaaggcatctgtggctnntgtgccatgaacatcancnnnnnnnncnnnnnggcttgcacccgccggatcgacaccannntcagcaaagtctccaagatctaccctctgccgcatatgtatgtgataaaggatctggttcctgacttgagcaacttctatgctcagtataaatccattgaaccttatttgaagaagaaggatgaatcccaagagggcaagcagcagtatctgcagtccatagaagatcgtgagaaactggacgggctgtacgagtgtatcctgtgtgcttgctgcagcaccagctgccctagctactggtggaatggagacaaatacctggggcctgcggttctcatgcaggcctaccgctggatgatcgactccagagacgacttcactgaggagcgcctggccaagctgcaggacccgttctctctgtaccgctgccacaccatcatgaactgcacaaggacctgccccaaggggctgaatccaggcaaagctattgctgaaatcaagaaaatgatggccacctataaggggaagaaagcgtccgtgnnngctgagcgtgaagtagccggctcggctggacacactttacatccaacttgagtcccttcagaggccttgattttccatgagcacagcatgtataataaaca

SEQ ID NO: 10096 - DNA, 560 bp, Canis familiaris
  misc_feature (1)..(560): n = a or c or g or t
tgagcccagagagagagagaggtggggccgagaccnnnnctgtgagaccttccttccctccccatagaggagtctccccaagacacagtgcgggctcagccctgcttcggggctcctgaggccggccgggcctgctggctggacagacccctcctctgttcttgctgcatccctcacctcctgcccgtttatttaagccccccaaagatgccccttctccatcccgaaacacagaacctgacacagacctacttgctgtgggtgctgccaggggtgggggtcagcacctggtcccccatctcctgagcagccgaggcgtgaggctggctttggtcttgcccacttgtcctccagcccagctccgagcacatgtagccactgagatttgctctcacctcaggggtgggctccttccccttcagtgccaggaaccaccacccacccccagcctcctgcagccttgacctctcaggatagaccccaggccttggagctcagagggtcacccctgcacccacccctccatctgctccttccctagtgctttgaggttttgtggt

SEQ ID NO: 10097 - DNA, 544 bp, Canis familiaris
  misc_feature (1)..(544): n = a or c or g or t
aaggctccccacgagaagaaaaagcagtagnncagagctggctactatagcacactccccatttcgagttatccacccgccctctgggtccttcccatccaaaccagtcagctggcaggatttatcattcattcctctacaattgtgaattcgtgagtcagggttttagtgggaacgcgatcctggggggaagggggcaggggagattttcagactgacacctagtgtgcacagtcccctgcgtgtacgatgaactcgtttcatcatttggcagagattcctcttttggcagcagttcccagctacttaggtattctggggtgagagtttgccctgtgctacccgtcttccccagggcctgaccagtggaaggaatgggggcgggtggtaggcgtgtggccgcctccctccccgaacctggttgggaccgtctccaggaccccactgctgggtggggggcaggagacagagtgactcaggtagggccccagggtggggtgaggaggttcctgctctggcaggtccaggcggaagggagcggaga

SEQ ID NO: 10098 - DNA, 585 bp, Canis familiaris
  misc_feature (1)..(585): n = a or c or g or t
ccagcagacgggggctgcgctgccaccacccccgcggccagacagnngcccccccagcacacaggacnntctgnntccggccagagaagagcccctcgcgagaaccgcccagaatcccactctagtgtccagnntgagcccagagattgccccaatgagggagaactcctggaggtagtggctcctgccccggaatggacgcccactgccagccccaccccaggctcccatgacatgagcgaggacaaggccagcccggcccggacaagagagtgggcggccccagaggtctcattccccgtgcagtggggtgccctggcgccctgggcctgagacagaatgcccccgagcctggggtttccgctgtggggagcagggggaggctgaggacacctgccctggcccttgccaagcccaccaagccccctggagaaggggggacattcaaaattcgttacgcctcaagggccatggctccttcctggggtggaagatgtgtagacactgctccaccggtgggtgtgtgctcgcgtgggggggggggacccttcaccatgcccgtgcacatgcacaggacaggtgtgc

SEQ ID NO: 10099 - DNA, 557 bp, Canis familiaris
  misc_feature (1)..(557): n = a or c or g or t
actcngnnntgtttgacaacacctgccccacccccatcctgcagaagaaatcatccacnnagcagcccctgtacagcagcagcctgtggggccctgtggctgatggcagtgactgcgtagctgagggcctgtggctgccacaactacatgtaggggactggctggtctttgagaacatgggcgcctacaccgtgggcatgggttccctctttggggggacccagacctgccgagtcacctatgccatgtcccgggtggcctgggaagcacttcgagggcagctgctgcctgcagaacaagacgaggacaccgagggcatgtgcaagcctctgtcctgtggctgggagatcacagacaccttgtgcgtgggccctgtcttcactccagcaagcatcatgtgagcggaccctgtcccccctccggagaactccagcagggccgcagagatgcctctgggagatgtgggaaaggcagcaggcaggggcaccctctggccaggactctggtgctcgctctgctgccccccacgctccacctgtagtgtttctgccctgtaa

SEQ ID NO: 10100 - DNA, 567 bp, Canis familiaris
  misc_feature (1)..(567): n = a or c or g or t
ccagccccaccgcccnntgagnannnagccccgcagccagacagcagcctggagatcctgccagaggaggaagagganngtgcagagtcctaaccccctgggccggtaggcccgcccagcacaggcactttatccagctcccagaggctggggaggaagggtgcgaaaagggcaggccttcccaccgtgcctcccgtgccctcccagtgagctgatatcattaaactgacacttctggcgtccagttgtcctcatgtaggtggaggaaggaggctgccaccttggcaccgacccggatgggggaagggggtggcttgtggtcccttttggccatgctgcagcgctgacatctgaccctggtgatcttgatccagccaatgagatgttaagagaaggccccttgtgggctcgtggaggtagggctctatcacccgcctggatttggggcttttggaggagtgaggatggggtgctggggtatggccaccaccagcagctgtgtggggacacttcctggacataatcgagatggaagggcctgcagagctgttcagacactctggggac

SEQ ID NO: 10101 - DNA, 675 bp, Canis familiaris
  misc_feature (1)..(675): n = a or c or g or t
accaccgagtttcgagataagtaccaagcgtggnncacaccccagatattctccaaagttcctgtcacttatgtccctcctgaagaaaagatggaccttctgacaacagtgcaggtccattacacataccctaaaggtgccccagctcagtcctgccgaccggtgctctcagtcaagaagggtggccactttgaaggctccactaccaccaaggacgactacaagcagtggcctggcatgcgcacagagctagtcaagcccgttccccagttgaacattcccactgagcccttggattgtctgaccactatgcgggcccactatgtgccccacccacccatcaataccaaaagctgtaagccttcctgggtgggcccccgaggaaatatccctgtggagggccagaccacatacaccatcagctttactcccaaggatgtgagcaggtgcctggcttcatacgctgagccccctggctacatctttgaggaaacagacgctttggggcacaggatatacaggccagtttcccagacaggctctcagcaggacagccgtctttctgtagatgattcagaaaaccctaaccagcgggaattggcagtgtcagcctgatatttaaaaatggttacttagaaattgcacaatacttttaaaagcaggtgattgagagtt

SEQ ID NO: 10102 - DNA, 684 bp, Canis familiaris
  misc_feature (1)..(684): n = a or c or g or t
agcgagtactacatcctcactgcggctcactgnctccagcaagccaagaaattcacggtgagggtaggtgaacgggacacagacaaggaggagggcaacgaggtggcacacgaggtggaaatgatcatcaagcacaacaagtttgtcagggagacatacgactttgacatcgcggtcatcaagctgaagacgcccatcaccttccgcatgaacgtggcgcccgcctgcctgccgcagaaggactgggccgagtccacactcatgacgcagaagacaggcattgtaagcggcttcgggaaaacccacgagaagggccgcccgtccaccaccctcaagatgatggaggtgccgtatgtggacaggaacacgtgcaagctgtccagcagtttcagcatcacccagaacatgttctgtgccggctatgactcgaagcccgaagacgcctgtcagggggacagcgggggcccccatgtcacccgattcaaggacacctactttgtcactggcattgtcagctggggagaaggatgtgctcggaaggggaagtatgggatctacaccaaggtcaccaacttcctcaagtggatcgataggtccatgaaagctaggggtgcggccccagcactggcggggggcccccacacctaacccccattaaagtcatcccacctgcagatccgccgn

SEQ ID NO: 10103 - DNA, 599 bp, Canis familiaris
  misc_feature (1)..(599): n = a or c or g or t
tctgaaaaagcagagtatgttcaggtctagaggagaagactttcatttgaagttgaacctcgaagctgttgatacttaggtaggtgatgcttcctctcgctccttattcagcccagttcgtaattccccaataatttcctactgctactagggcctcgcagagtctcccgtaaataatgtactgtaaaactgaaagtacttggtcataattagcttaagtgtggacaatgtgttgtctttgaagtctttaatgagtttaaccgtaaagtttaaaagcatacgatatgaaaaaatgtcagtgtgctctaacatatgtggacgagagtgacttctggacataaatgtgtttacagttctatttttatatgtattacatggtctaatgaaaccagaaatcgctggtaatttccaccccccaggattaaccttctaaaagacacacagagccaagattttactgtaaaatattttaattgtgttttgtactttgatttaatgaaacatggaaatagtggttttcatttttggtcaactgaggaacctattttaatttgnnnntgggaaagtccatttnnnnaatagatacaatattgctacaa

SEQ ID NO: 10104 - DNA, 622 bp, Canis familiaris
  misc_feature (1)..(622): n = a or c or g or t
tggtntgttcattcccaaaggnacagtggtgatggtgccaacctttattcttcatcgagnnnagaatctcnggccagagcctgaggaattccgacctgaaaggttcagtaggaagaacaangacagcataaatccttatacatacctgccttttggaactggaccccgaaactgcattggaatgaggtttgcaatcatgaacatgaaacttgcccttgtcagggtcctgcagaacttctccttcaaatcttgtaaagaaacacagatctccctgagaataaatactcgagggattattcaacctgaaaaacccgttgttctcaaggttgagccaagagatgggagtgtaagtggagcctgactttcctaaggacttcccctttgttctttaagaagctggatcccagaataccagagacctcaattttctttatgagtaaaacccaaaaatgaagatgggcttcacgtacagcctgtgatggatgactgggaattccatacattcatttagctttcttcgatgtctatgtcaagcattatatattgtgtaaagaagtgactaataagtgtcagacatgtagactcaacctatccggttcacacagactaccccctgtttgta

SEQ ID NO: 10105 - DNA, 526 bp, Canis familiaris
  misc_feature (1)..(526): n = a or c or g or t
aannagtacagcgctcntgtgccctgngccccttncnctcatgggggcgctgccccctgctcttcatctccaagcacacccgggtgggggagggaagggaggggcacagtgttcctggcccatgacactgctcatcgagggctgtgggggaaacaggactcggcatgaggactgggnctggggtttggagaatcagtggtgccaccatctgagcacaggaccccgtgtcccggcctctgccacttcccagcagtctgaccgtgtcaggtcactgccctccaagagcctcagcatcctcatcagggtaacatggatagtgctgtccccttgatggggcggtgggagtgcaggagggccctggccaagagtgtggagctgtgtatggtgtcaaccacgaccaccgtgggctgtcctcaggtcgacttgccagtgtgtgttgagtgcaggcctaatgccgcaagcaacgttggcccctcctgacctcccgctctgggcccctctgctctccagatctgcacctcctaac

SEQ ID NO: 10106 - DNA, 663 bp, Canis familiaris
  misc_feature (1)..(663): n = a or c or g or t
gatgtagtctgtttctagaatcctcttaagcattttttagaaaaatatttttataggtaaatactcaggctnnnctagtggatataatcttnnagnctccatgattacccacnnaaagatcaaagtattatatgctgtgtgctttttagctgttagtgctatgaaagcaaaaaggctttctttgttggcgtgcctggtttactgggcgccaacgagtgtgtgcttatgctggaagtaggctaaaaggtctccctttcttacagcatgttaagtgtttgtacaggtttctgaaatccctttccatataaatcattttgttaggtattctgttgggggtagggtctctgtagttgcctcctcctgtcagaatctgcctgccaagatggtgttccactgagctagctcagcagaagtaggagagcagacagcttcactggtcatctgtaggctttgacgtagcacaatgtttcagagaaattactgaccagaaaagacatatcatacctctagaaagaaaaagcatagtgtatttcaattcccaatgtgtaccttctatattttttccctaagtaaaaacaagactctactgatttcagttggctgttgtggttttaaagtatgagctatagactgtgtttttctgtactaatgtgtggcgcttat

SEQ ID NO: 10107 - DNA, 601 bp, Canis familiaris
  misc_feature (1)..(601): n = a or c or g or t
actgaagaggaacccagcttttcctgccagctcccccattgaggnnntggatcacttgtcccatggggacatagccagtagtttgtcaccagagcctccgtgggcttgctcagcctgcagtcaatgtaaagaagtngaattgcccaaaagagatggggagggagaaacaagtcacctgtcctctccggctcccccttcccggttcccctgggtcccacccccgccaggatctgggatggcagagaagcttcttgctcctgttggactgctagctgcacaccctgacgacctccttacggcccctcttctgccctttccatcctgcccaggaccgccccctgctccccaccctaccctgtgcccaagcatttcctgtttcctgaccgggaaggacaggaaggccgaatgcctggaacagactccaaggaagccctgaggagcaggcctggccatctgggccatgcccgctgcctccctcctgctgtcctgtctgccgacccctagatggcacagccgggggggcgctgctgggtgggtgtcccaccgnnnnnnccacagtgcccagttgtaattttattaagctgtaatatctatttttgtt

SEQ ID NO: 10108 - DNA, 577 bp, Canis familiaris
  misc_feature (1)..(577): n = a or c or g or t
tgtctgnnnagaaatagtaagcatgagtggttaaggttaattggttgaagtattatcagtgaccagctttcagaggaaacactcctcctacgtgtgtgtgcagtgatggcggtgggcagcatgcccttggagtcgtggagccctcgtctgtgatgtgacccattcacaggctctcaggaggaacagacgaagttggacatttgggagcacccaggaggccctaagtgcagggactgactgctatcattaaaagtgggtgttgtcaggaagagattccattagaggtgccctgttagcctctggctggcgctctaggtggatggttttctctgtggcctgagagctgcttctctggtgtctttctctgtggggttggtttccgtgcctgtgaatacttcccgtaggtttcagggtctttctacaaagacaggagctgtgtggatcctttacacgtctgtttgcccagacagtcatcgttggctgaggttctgattgagacccttccccccaaacggatcttaatgtttcccactcttgtttcacatgtaattnnngaagtgtcactgtttttcccttt

SEQ ID NO: 10109 - DNA, 654 bp, Canis familiaris
  misc_feature (1)..(654): n = a or c or g or t
aggtggcaattgggcgacgnnnggtgctgaatgtctttggtaatgactacgacacagaggatggcacaggtgtccgggattatatccacgttgtggatctggccaagggccatatcgcggccttgaggaagctgaaggagcagtgtggctgtcggatctacaacctgggcaccggcacgggctactcagtgctacagatggtcgaggccatgaagaaggcttctgggcaggagatcccatacaaggtggtggcacggcgggaaggcgacgtggctgcctgttatgccaaccccagcctggccctcaaggagctgggctggacagccgtcttagggctggacaggatgtgtgaggacctgtggcgctggcagaagcagaacccttcgggctttggtggccaggcctgaggccctcccctgccacgcataggagaggagacaaaggacagcctgctctccggcctctggtgggcacccatggcctcagcctccctacctcaagccccagatgggcctgctcagcccgccgggcacaaggccctgtgctgggcaggagttggggctcgagcccttcaggctccaggaagcatcgggaccaccggaagcaaacgggggagcaggggccctgggagaggcactaatttatactgctctg

SEQ ID NO: 10110 - DNA, 668 bp, Canis familiaris
  misc_feature (1)..(668): n = a or c or g or t
acagcatgcgatgatgacancacgtccttgctgcgagactgttacttgcnnnnnnagaannngnnnctcaannnagaatggtncctgtttaaagagcaaaaaaagaatttcgagaaggaaagacgaagctttacagaagcagccattcgcctaggattggagagaaaggcgtttgaagaagaaagagccagttggttaaagcaacagtttttaaacatgactacctttgaccaccagaactcagaaaatatgaaacttttcagtgccttctcaggaagttctgatcgggacagtctctcagtgcactcgaggccacggcaaaagaagcctcacagtgtgtctaacgggactccagtttgcacctctaaacttactaagtctcttcctgcttctccttctacttcggacttttgccagacacggtcctgcgcatctgagcatagttccatcaatgtactgaatataactcctgaagaaactaaaccaaatcaggtcggcagagaaggtacaaatcagaaatggagcatggcatcaagacctggatcacaggaagggtgctacagtggatgctccttgacctacacaaactcccatgtagaaaaagatgacttaccttagacgtctggactggaattgttttcattaacacgttcatcagatttcacatc

SEQ ID NO: 10111 - DNA, 617 bp, Canis familiaris
  misc_feature (1)..(617): n = a or c or g or t
ctctcgagnngncaccaccatccaggctgtgtggcgaggcttcctcactcgccggcccgagactcagcaaaccatgctcccggccatgtggtgcaaaatgggcagcaggaccaggtcaggatccgaccaccgctgtttccagtcgtgccagccacacatctgcgccctctgccagtcgctgagtcccaggctggggagcccgcccagcgtggtgatgctcgtgggttccagcccccgcacgtgccacatgtgtggccacacgctgcccactcgggtggtgcacggcatgggccggggctccacagtccaggctggcttgccgtggggctgcgccacccagatgaattcccggagcccccggctgtcccgtcgccggattaaggcggccacggccatccagtcggcctggagaggcttcagcgtacgccgccgtctgaagcagcagcagatggcagccaagatgcttcaagccacctggcgcggccatcgcacccgggcctccctcactacggatgcgctcttggggccggcagcgtgggacagctcgcagcacatgcagtggccaggtgtctagaacatcggctgactnnnngggcgggggacaccaggggagggac

SEQ ID NO: 10112 - DNA, 621 bp, Canis familiaris
  misc_feature (1)..(621): n = a or c or g or t
gcagagccnagcagccagagccgcagatgacaaggcggtcactcacagccaggacctgagtctgtgttaggaaaacatattaattctcatataaacccagttcctcaccattttcctctcatctttcagtgccatttctcttcatgttaggctgtttgtacaaacttttgggagccggggtggtacatcagttctctggaatccgccaggccgctggggggtggatcaccacaccctgtagggcttctcccctcctagctgtctttgggaaacgcaggactgggaggctgttttgaccagagaggccaaggtcaagagcaaggtgtagaaaaattgtaaaatagaaaaagtggtgttggtgaattggttttgttttgttttgttttgttttcacatttggatagctgtcacaagaggtctttccctcagtttccagcatgttcttccttttctccctttctcacgtttttcctcctattaatcaagagaaacttcaaagtccatgggatggtcggatctcacaggctgagaactcgttcacctccaagcatttcatgaaaaagctgcttcttattaatcgtgcaaactcttgccacgatgtggggagtttganannnnttc

SEQ ID NO: 10113 - DNA, 599 bp, Canis familiaris
  misc_feature (1)..(599): n = a or c or g or t
gaagccatgaaggtggctgtcaagaagcagcggaagaagatcaaggccaagatgttagggatcccagaggaagcagagagcagtgaagatgaagacagctcatggctcctgcngtctggcaataagggggcccaccctccacccactgaatccagaatccagcgtttctttggcctgtcctatcagggtgaaacagaggcccctgaagcccagaccagcacggtgcccagtgagctaaggggagaagaggaggctctacaggaactccatatgcggcctgtgggcagctctacagtcctcaattcctgactggctctgctctgcacttgatgaacagctttctctgggggtctcagcagccccagagacctgactttggaatctggctatgggtggatgtgtggcctcaaatgaagacagggctccttccttctcagccttccccaggctctttcccagttctggcctgagccagggcatgatgaagagctcagccttccctgtatctctgtgccaagcctcaggggccagataaaagtgcttcctcttggaatctcagttttcttatccataaaatagagctacctacctcccaaggg

SEQ ID NO: 10114 - DNA, 704 bp, Canis familiaris
  misc_feature (1)..(704): n = a or c or g or t
cagagaaattgatgagcnnntaaaaaaggagacaaaanncaaaggnnctttggaagtactcaacttgaaagatgtggaagaaggagatgagaaatttgaataacatccatcaagctcttcagctctaaaacactataaagtattttcttttcccacagtcctcttttctgtggtctgctaaatacttgctcaaactgttggacattttctatctttgtggtaacgtatacacaaaaagactttcctaatgagtattacactgtgggattcatttagttttaatgataaagtggggttttaggcaaaaacgaaaaatccaagctgcagagggcagagtaacatgttgctactgtctcgtgccttgtacttcccaatgtgcaatttatccgaggcaactcttgtgggtaaaaagttaaactttgcacattatatgtgataaaataaatgcaggagggtatgacaatatgacaaaaggagtgtttgctgaagaaaacataatgtcttatttgtacttaatgaaacatgtgacctaatacaaagtttggatgatgacttcctgattatctgaaaaatagttctgtgatgactgcaggactgaaggaatattcgttaaatgtgctgccataaactagattattctcggtaaagaataaagtcatttgtttctaatccttaaagtttataatatatattaatatagctga

SEQ ID NO: 10115 - DNA, 593 bp, Canis familiaris
  misc_feature (1)..(593): n = a or c or g or t
cactgtctccctgcagctctgccagcaactcaaggataagatctctgtgttctccagctactnnagctacaggccnttctgagcagaacacccaagagcctgacccccagggaaatggcccttgtctccctcccctgtccccccaggaatgttggccagagccagaaccgggcagcatggactatttatttccctctttatcccatcctgtccatcacatttgcacaaatggaaatgaacactggaaacgctgaaagacagggacgctggcttgcttttcattttgcaggggtgggagcggggggtcaggaaggtgggcggtcagggaggcagagcccagaggtggcccacattccaaaccctgccttccttgcacagtggcaacctttggacccagggtggggccaggcccagggctctccttccccatcctttttctgccttctgagctgccccaagatgatgagaggcagcccgtggagggtgaggaggggatggcggccctaagctgtgagccaggagggcagatggaaaccgcccaccatgagctgtggcgccctcgcatttatttgctccatgtccccgacaaggcc

SEQ ID NO: 10116 - DNA, 703 bp, Canis familiaris
  misc_feature (1)..(703): n = a or c or g or t
tctgagganncagctcntgcttcnngcacacaaatgagctcagtccatttccnntctgttnctctnnaaagtactcttggcttttgtttaaagcacagtatgttaaagctggaagtggccttatgggtcacctggttcaagtcaacttggcagatggagaaagtaaggctcagaaagagaaagtgatttcatggtatcaaggttatatttatacatacagagtgtcccagacagaaacaggttcttggagtgctgagacagcacctggggttcataaaagatttttccggaaaataaaaaatctcatttcagcatttcagaagccagatcaaggtattgtaatacctctgcagtatccagttgagaagaagtgctcagttagaagtgcacaaggtactccagggagaagagaagatcctgatgtcttcctgaaagcaccatgaagaaaaatcaaatactttgtactttattttctataatttaaatatatgctaagtcttatatattgtagataatacagttcagtgagctgcaaatatatttctaaagccatcatagtcctgtaatggaagtatctagcatcatgtaaaagctgaaatggactttgccaataatgaggagcttcgaaatgaggttattttcagttatattttcaaatgggaaactgattcaaaacataacgatactttataaaagataaatg

SEQ ID NO: 10117 - DNA, 577 bp, Canis familiaris
  misc_feature (1)..(577): n = a or c or g or t
ggnnaggtgaatgccaacgtggnnatgggagggatnnagggtagcagggacataccatgggtggtgatttgtggctgtgggggagaagagtctatagcataaaccttatcctaccagccaagggacttaactcttaagagaagtgcatgtaaagaatggttgccattgtttatatctagatttgacaaggtgtcaatttctctgtaggttgtgactttaaaaaattatttaagggtaatgctgcattagtatttcttagagggaactgttctttaaagataggaaagggagtaggcatgtgttggcacaggctgttaaatagaagcaatgaagtctgttatgctaatagtatgtgttaagattgcttttctttcatgttttcatggttacatatatttagagcactgtattttatttgtccttttgtttaaaaaaatagcatttctaaaagaaaagcaaccccatttcaagttgtctgttaattctgatacaacttgtatattttagtcatttgtaaatctctccatactgtagtgtcttctccttttttaacgactgatacagtatcctaattaca

SEQ ID NO: 10118 - DNA, 662 bp, Canis familiaris
  misc_feature (1)..(662): n = a or c or g or t
tgannaggtgnagctgtacaagaacgcccgggagcgggagaagtacgacaacatnnnnnngctgtttgccgttgtgaagacgatgcaggctctggagaaggnntacatcaaggactgcgtcacccccaacgagtacaccgcggcctgctcccggctcctggtccagtacaaggccgccttccggcaggtccaaggcgcggagatcagctccatcgacgagttctgccgcaagtttcgtctggattgcccactggccatggagaggatcaaggaggatcggcccatcaccatcaaggacgacaagggcaacctcaaccgctgcatcgccgatgtggtctcgctcttcatcacggtgatggacaaactgcgcctggagatccgtgccatggatgagatccagcctgacctgcgggagctgatggagaccatgcaccgcatgagccacctgcctcctgacttcgagggtcgccagacggtcagccagtggctgcagaccctgagcggcatgtcagcctctgacgagctcgacgactcgcaggtgcgccagatgctctttgacctggagtcggcctacaacgctttcaatcgcttcctgcacgcctgaggctgtgcgctgggccctgggccccgggggcagggagggccaccggctctgcctgtga

SEQ ID NO: 10119 - DNA, 639 bp, Canis familiaris
  misc_feature (1)..(639): n = a or c or g or t
actctcagaaccccaanntngccaaganncagangaagaactcaggggccagaggccagaagcaaaagagcccgggccagttnngcagacatggggtccactcccaagaaaccccggaaatgcagcctttgccaccagcctggccatacccgtcccttctgtcctcagaacagctgagaggcaggggtggggagagaaggccgcttcctcagacctacccctctcatctcatgactaagctgttttcactaggaacagggggtccttccctgacctggaggccttgagaaaagtggtggcttttggagtctgacccacttgtgctctggtgtcaggatccagaccatctctggtagacagtgagcctcggcctggggcatctcactcctggtgctgtggggcatttagtggcagggtcagcgcatcccacgctgtggtgtccagggctttcttcccttctggaaaggccgcttgagggaccagcactctaggcacaggctccaggcagcctggagggggcttcgcgcatggacattctgagaatggagggtgtaatgtaagaatgtggctcttgttctaaaattgtgtcgaagaagctttattttttttttttatctagatgccactgtggccaagata

SEQ ID NO: 10120 - DNA, 671 bp, Canis familiaris
  misc_feature (1)..(671): n = a or c or g or t
ctggatgttnannctgcccattcagagatnntcnagtacttccagtcagtcanctctaacnggtggctcatggtcaaaatcttcctcatcctcatngtcttcttcatcatctnngtggtcttccttgcctgaaccctctcaactctgaggcactctgagcgggtttggaacccctttgggagggtggcgggtggccattgctgccactgagcctgtgcagggtgcttgggaggaaggccctgtttccctgggactgctgagaatggccaatgcccctgaccctttgactctggccaccctgtcctcccctcaccaccctcaggccctcgaaacacacacagttctggatgtgtactctgctgtgaagtggctggaagggagcagaggccaactaggggctggtaggggaggttgtctccactaggtaggagatttttagaaactccccaacctcttccaaaggaaactttggcagcaaggggagatgatgcccttccccttcctgagagtgaggaaaggaagtgaaactgcccccgggaccaactttcccatctgggttagaatttgacctctctcttcttcctctctccactacgtgaggcagggggccctgagcccctcagctgcctgcacaaccccacctttggctgctggtgactctcaatctgcca

SEQ ID NO: 10121 - DNA, 545 bp, Canis familiaris
  misc_feature (1)..(545): n = a or c or g or t
ttgccttttcaggatgcgngactattctcaaagggattgggaacataggccccattccaggcagacccagggcagatgtgtcggacgagcaacttcttttcctctgtgaggagacaggacttggagacgcagcgatgtcaccccaggcccagactttcctttctatggagaatttctatgaaacccactcccttgccattccagggcccagtgaatgaaggtttgcatattgtccccatgcctttgattcacttcctctcattcggggagtgtttgttttgcttgattttgccttttctctgcagttgtgttttatcacaaattataaatatagtttcaaaatcgtgtgcttttgaaagcagcagcatcttgataaactaaaccttaaggtgtttgcacactcaaaccttgaccccattttctatattttaaataccttttacccaacatttactatacgttcaactatgtggcattaccttataatttgaggaggcattcccttttgatttgggcctaagtgttaacaaatcactagtgctatt

SEQ ID NO: 10122 - DNA, 538 bp, Canis familiaris
aatgagaaaagctctttaataatcccaaagaaaaaacggtcccttttgccaaagaacacttaggcttgaagacatagaagaatttgcttgtttttctccttggggaagacatgtttccccttactgcaaacctcagtgagctcatccccctcagcctgtacccctgccctgcgttggcctcatctgctttggcatcccattggcacctggatcgggaaagaccctttaccttgaataattggagcttgttttgagagccaaatatatccccgagagtcacgagatttggggaacacatgggtcttctatccatcccagccccctgaattagtttcactttttttatatttatcatcccatatcgagccctctataacaaatgtttgtcataattttatataattttataacttttattcattttactagattcattctagaagtcttcaaatggtcaattcttaaactgtggaaaccattgaatgaaggtgcttattaactattcccccaggtttatacaagtatcagatgattcctt

SEQ ID NO: 10123 - DNA, 660 bp, Canis familiaris
  misc_feature (1)..(660): n = a or c or g or t
aagaaggnaggtggcgnctcattctgtgtgctacatgtggatcccatnnaacccatagggactgctcctctcttagatccaacagtaagaaatgggagtgtgaggagtgtgcancttctgctgaagccacagactatacaccagaaaactcaggtgacatcccttgttgcagcagcaccttccactctgggaggcatttctgcagagacaccagcctggaagagaatccaggcccttcttggactaattggccaggaccttccttattagaaaagccagagtcctctggtggcaggaggagccactcctggcggtccaagggtgtcaaaatcactaagagctgcaaaaaatccaagtaacagcttccgagtagtcgctgccaagtacatttgggtatgaagctgtgctcctccaccgggtttaggggagggagccctttgggactgtgagacaaggaaagagggccagcagtgagagtatgaagcaaggaaagagaagtcccaggggagtgtgaggacagagcagagtccagatgccaagcttggaaggtgttagtggttatgagagtgcctctgctctttctacctgatccccgaagggccttcttctcttctcccaccctaatctgcttctcatatgcctcttcttacttcacccacg

SEQ ID NO: 10124 - DNA, 617 bp, Canis familiaris
  misc_feature (1)..(617): n = a or c or g or t
tngccctctctgaatctcagtcttnnggtctgtaaagtnnnntnnnnnnnnnacccacctcatttggtagntgtgagaacgaaatgacgtcatgaatgnnaaccagaggggattgcacacctctagtcagggtctcagtttccaaactgaagagcctgtcggttcctgtggggagatgtgggttgtgtcctttgctgggcaaggcaaggccagcagggcccgtggcatggggaatcccggacacctgggactccagcattgtccccaagctccctgctgggccaccttccttcccaagaagcagtaggtgctggggaatatggagcaggcaccaagtctgtagtggaatttgccagaggccacatgacatgtgagatagggcagactgcctgcagaagcacatctgaggatccagctgtcttctattaagccagttgctaaagagatgtgcaaaaggtaaaacaacgccactctcctcactaaaactttttgggaaaatagttgttttttttttctataagtagtttgtattaatgtgtaatttaatctatgttccttgaattataattgtttctcacctgttattataattactattacatacaattacttatatg

SEQ ID NO: 10125 - DNA, 590 bp, Canis familiaris
  misc_feature (1)..(590): n = a or c or g or t
attcatttcatnnncnngatccaangcagcaatgtcgggtggacnctgggctacatgctgaacctgaccaacatgatcccagcngagcagnngtattccaagcctctctcccacaccacctacatcttcctcatgatcctcttctccctgatcctggtcgcagtggtcatcataggcttgcttgtcttttacaagccttcatatttctggaaagacatggtatagcaggatccgctgaaatctgctggctggagtgaaaaaacaaacttgcccaagaagcactctcctccacgttggtgcacaaggtcatccttccttgctcacgaaggccagccttgaccagcacgaagctttttgactttcgctgaagcctctccgtggaatgtattcaccacctctgcctcaaggactacctggcagacatcgtctcttttatttgtctgccttgccctctgcctttggggagccacagcctaccacccagtgagagcctggtgtgccacctagggatttcttccagttctcctgccagcgtgttattcctgcgcttctgctagaaacccgtgggaaagagctggaagtgatccata

SEQ ID NO: 10126 - DNA, 632 bp, Canis familiaris
  misc_feature (1)..(632): n = a or c or g or t
actgcatgtgtgtgagactgaggtgggtcagggcctgctgggctgtggggnnctgagcaaggctgttggctactgagcagctctgccgccctctgctggacgaggagggaaggagggaagacagtccagccctgcagctggctatttttagaaatttgtactttaagtaatatttcatttatgtatatgtaattttaacaacgttattgagatatagtggacatatagggaactctccagggatgcctgggagttcaagtctgcctttggctgaggtgatgatctcctggttctggatggagcgccacgtggaactccctgctcagttaagattccgtttcttcttttgcccctcccccttgctcctgctctctcacccagtaaagaaataggttatactcaacctatgtaaagtacacagtttattaagttttcccgtgtacgtgcaccacagacatcactcctacgggaagatagtgaatatgtcccttccactcaaaaatctcatgtcctctctattctcttcctttggcccctcttaaccctccttccactggttcacatgaaaccttacatttgatttttgttagacattagtttcaatttttaattttaaattgaattannnnnnn

SEQ ID NO: 10127 - DNA, 674 bp, Canis familiaris
  misc_feature (1)..(674): n = a or c or g or t
ctnngtcacccaggactgatcccaaggagtggnatggctggatcctccagtaagagcgtgtgcagctcacaaaggcatagnctctatccagggtgtttcttgagatggtggctgagaggggggcaacaccctgaagggagcgaggaagaccacgaaggaggtcaaccccaaattcactggaaaggaaggcctccctgatgcaccaacttgacctccaccctgtcagcatctggggcccaactccgaggatgaccttgaagtcagtcctacaaacgaaggaaaaggagaggacaagtttgtccctgataaacttcaagtggcagagccctcctgagcaaacaaagaccccaaggagtgaaccctaaatgcttgtctattgggctgaaaaaggagaagagattgtggaagagtaactcaactatgtggggaggctaaaggagcataaggattttctttttttaataacaagatctgtttttccagaattctcatgctcatgctcaagttcctgtccttgaagataagaatgtcattcactcccctcctggcactcccctccaaggcaccttccagggacatgggaaggagtgtgcttctagggaggaaaaggagaggagtcagcacaccttccacctgctgggggtgcggggcggtggtggtccatgtgtttcttt

SEQ ID NO: 10128 - DNA, 663 bp, Canis familiaris
  misc_feature (1)..(663): n = a or c or g or t
agactaggtatgtgaagacnnncgggaatgccacagtnnannatctttccaagtacnnnnnnctgcgtattgcccttgagcnnnnnnagcagcaagaggccggnnagnnaggagggcctgnagggggcgnntctgatgccgggggacctgatgggggtggcggggagggtgggggtaccagaggcggtgacggccctgaggagcctgccttgcccagtctggaaggtgtcagtgaaaagcagtacaccatctacatcgcccctgggggcggagctttcacgacactgaatggctcgctgaccctggaactggtgaatgagaagttctggaaggtgtcccggccactggagctctgctatgcccccaccaaggatccaaagtgaccccacaaagggacagccagaggatggggaccatgggatgtccctttgtcctggcctaccacccccagcttctttgtcccccagggtcccccaacctggccagccagcaagaggacacaaatgaggacaagtggcttttatacaaagtatctatatcagattcttctatattgtacagaacggggcatgcgcccccatctactgccttttctattgcccccccaacctcccagctatctaagatgttggggaaggtgaagaaccctccccttcatgccct

SEQ ID NO: 10129 - DNA, 634 bp, Canis familiaris
  misc_feature (1)..(634): n = a or c or g or t
tcaacatcattggggtgnnagtcatcacgctggccatcaacagcnnnnncttccccatcttcaacntgcacactttcccctcctgggcttactccaacaccacaaccaactgcatggccatccagacgaacatcaccacgacacctagcccctagaccagcgcatgatctggccaagaccaggaagactcacctgttcgtatccctttgagccaggaggggacacccaggcttcaagccaaacattgagagaaaggaacctatatatagaaccttgtatgtgtgtctgtaaggagtgtgctcaatcctgcatttctgagatgtgtgtgtgtgtgtgtgtgcgcgcgtgtgtgtgcgtgtggcgtgtcatgtagcttgaggatgcctgagagggtgtttcttgtgtgtgcacatgctcctcagtgtgtgtgcttggcagtggacatatgtgagttcacagaccatacaacatgccccctctagcactccgggtccttgtctccccagcttggtggctgaccagacccctttgcactgtatttattgaaactcggggttgggtagcccggggagcagggcctatgaggagttgctggtgggaccagcccagctactgaagtctccccagcttctca

SEQ ID NO: 10130 - DNA, 655 bp, Canis familiaris
  misc_feature (1)..(655): n = a or c or g or t
ccagcaccganngccatggtgccctctccctgtctcctcnnngcagaagtccaggttcccnngcagactttatgctgacccctctgtcacccactgccagtcagggcagtncttcattctgcgttgggagtctggaagaagactctcccttcccttcctttgctcagatgctgagggttggaaaagcaaaagcagatgtgtggcccaagactacttcaaaaaaagatgaaaacagcttagttcctcctgctcctgtggacagcgatggggagagtgataactcagaccgtgttcctgtgcccagtttccaaaattccttcagccaagctattgaagcagccttcatgaaactggacacaccagctacttcagatcccctctctgaagagaaaggaggaaagaaaaggaaaaaacagaaacaaaagctcctgttcagcacttcagtcgtccacaccaagtgacactactggctaccttctccatctggttttcttttttctgtgcttttgttttgctgctgtaatttttaagtatttgagtttgaacattagctctggggggagggggtttccacagcgtgagggggaaccaaaattttaaatacagtgtattttccagcttcnnnnnnttacaccaaaataaagtannncannnn

SEQ ID NO: 10131 - DNA, 599 bp, Canis familiaris
  misc_feature (1)..(599): n = a or c or g or t
ccgatagagggcaanatctagcccactgcccattgcccacactaggtcaaccaaagctctgcgattccaccgttgtccaaaagaaagaaggcaaagtgcatcccagggtgcttggaagaaaaccggcctgcctgaatctctctgaatttaattcaaggccttttgaagtaggctttctttctcggttctcacaggaacgttggtctggcccacggccacagcgtctggagcagtcaaggcctcagccggcctgacgcctccatgtgggccagtctgcttattgagcttttccagctgcttccattgtcaccactgctgcccctcgctgcgctcctgctggcattcaaaggtggcacagtccccacctggtgttccnnnnnnncgtccacagcactgctgtgcattcagattgaggattaagaaaagggatattttttaaatgaaagttatgtggtgtataataataataaaaaaaggctttactgctttttctaatgtggttatctatgtgatttgaaaaaagaacatataatgtcaatatgtaaacatggttacaatcagtgctgaaaatggtcttttccccctttttctgcattttg

SEQ ID NO: 10132 - DNA, 529 bp, Canis familiaris
  misc_feature (1)..(529): n = a or c or g or t
tgtgtgcccccgccgcnctctcgcnggcgccccgnntccctcgatgaggccgaggannnnngcctccgggcaaggccccttcttctggacccggccgtggcggggcaggcgtgctgggcagccacctacttggtgctactctttgagtgtacataggttttctcagcagctggagcccttccggaggctcagccttgtgtgcgtggcaggtgtgtgtgtgtgcgtgtgcgcgcgcgtgtgatcccgagagaggttgagtgtgccaggagcccaagcttgtggctgcagagataggaggcgccctgaccccccacccattttgggcttagagaacccagagaggcggctgaggggcctctggggggcacctgggcctttttcacagtacataagcaatctttgtatcaatgatgttacactaatggaaactgattgcccttctgccactgcttggacaagcacagaggaagctgaacggttccaaggcaggggcaagcacagaacaatggggccgccagctggagcagtg

SEQ ID NO: 10133 - DNA, 615 bp, Canis familiaris
  misc_feature (1)..(606): n = a or c or g or t
atgcagaattnnntcagttactnnnacttcatcaacagttcgaaaccctcattccatattctcaaatgaaggatgttgacaaacattatataaaaccaattacaaagtgtgaaagtagcactcagacggatacacacatattgccaccaaccattgtgagatcgtatgagtggaatgaatgggaattaagaagaaaagctataaaattggccaatttgcgtcagaaagttactcactcagtacaaaccgatctcagtcacatgagaagagagaattattcacaggtgtacccacccaaggatgctagcacgcagtctatgagagaaggcagcacccgagtgcccaggccccagatttacctagctggtctccgtgggggacagagtaaaatcacttctggggtcaaggtgaacttaaccagagctgttgatgagacctagttagagactgaatttttaaagtggatttcactaagttatggacagtggcaaatattgacaagtatctttgtatctgtgaaaattagttaattttgtgggtctggcacatttattggttgtgtaaatgttttccagattcttatattcactgtcaaactgctacaaaaaactaaaa

SEQ ID NO: 10134 - DNA, 624 bp, Canis familiaris
  misc_feature (1)..(624): n = a or c or g or t
atnnnacagggattgcttnntgatgtcaaaaagccacggctnntacatggcactctgatcatgaaggacagtaacttccggctcgtgtcctcagagcaggcgctcaaggaactgggcctggctgagcatcagctgcgctttacctgccgtgtgcacctacatgaccctcgtaaggagcaggagatggccgtgcgtgtctatagccatctgaagagtgtcctcaaggaccactgtgtgcagcatcttcctgatgggtctgtgacggtggagtccatcctcatccaggctgctgcccactcagaggacccaggcaccaaggtgctgctggtctcctggacctaccaggacgaagagctgggaagttacctcacgtcgctgctcaagaagggcctaccccaggccagcagctaaggtcagctggtcaccatagggacttgggcttcccctccagggccacatgtgtctcagccctcattctgtgtccctggatggggagcccacggctggttacagccttgtctttgaggacaagaccacaagtgtcactgcctgcccaactggctggttttggctgaggaaagaaagaacnnnggggacctcatgannnnnnatttctgttcctga

SEQ ID NO: 10135 - DNA, 544 bp, Canis familiaris
  misc_feature (1)..(544): n = a or c or g or t
ccctacggannnagtatattccagtccaaagagtnctcatctgtgcntagctgtgacatctcagtggatgataagtacatagtcactggctcaggagacaagaaggctacagtctacgaagtcatctactgaaaacatgggtttaacgtttatagttgaatcgggccaaaatgttttgaatttgtagaaatagaaaagttgtaactttaaaaggaaaaaaaaaaaccaccatgaaaacctgtttccaaaccttgacacaaaactattttgagtctacaaagaggaggcaacaagtcccatcaactgaaggtcaccgatctacctagaccaaacggacaccgaggcagagtggacagaggggccaagggctgtaggcagagcctgtactttcctttctgtgtgatctgcctagattacctttctgttccttgcagttcccctcacgttctgtgcttggtagagcagtggtgtctccaatgaacttgtttcctggttttgcatcttgtgaaatgtttttttgtnnnnntgttgaaggttaaacatt

SEQ ID NO: 10136 - DNA, 604 bp, Canis familiaris
  misc_feature (1)..(604): n = a or c or g or t
cgatcatcgtcatgnnctgtgtcatcgtgctcaacgtgnnnctgnnnnnncccaccacacacgccatnnnnccgcggctgcgccacgtnntgctnnagcagctgcccagnntnntgggctccagcgcaccccccgaggctccccgggccgccccgccgcccaggcgcgcgtcctcggtgggcctgctgctccgtgcggannagctgatcctgaaaaagccgcggagcgagctcgtattcgaggggcagaggcaccggcacggggcctggactgcagctgccctctgccagagcctgggcgccgccgcccccgagatccgctgctgcgtggaggctgtgaacttcgtggccgagagcacacggagccaggaggcctccgtcgaggaggtgtccgactgggtgcgcatggggaaggccctggatcacctctgcttctgggccgccttggtgctgttcggcgtggggtccagcgtcattttccttgggggctacttcaaccaagtgcctgagctgccctacccaccgtgcatgtagccggcttccccacccggttcccggggcggggtggggtggggggctgctgtacggtgatcctttaccgacct

SEQ ID NO: 10137 - DNA, 600 bp, Canis familiaris
acaccagcttgctgctatgatttcagagcacataagtaaaggtgcttttttaatgtgtggtctacagccagagcttacttagttgctgatttctagattttgatgtttctaaagtttaggtggatttatatttctttttgctttttcagtacataaatttagttatttccaatgaagcttgttttccttttttttttcttcccattttggctactgcaatgctttgtttcacacttgatttgtaaaaattttatatatatatttaaaatgtgccattttattattgctaagtgaagtatgtcctgttttctgctataattatttctcagtcagattgcaatgtcagcagttactgccacactcttgtcagcttaaacacaaatgttaccgcttactttttcttaaaaatacaacttaaaatgtaggtattttgaagtactgggcttatacttcaattgggatagttgtgtacagcaataagcaggttttcaaatccagtacttagtttgtgtacaaatgtaattatgttcattgtgtatatattatacaatgagcacatgtaagtattaaaggctacttactcttgtttaaatgcaaatg

SEQ ID NO: 10138 - DNA, 681 bp, Canis familiaris
  misc_feature (1)..(681): n = a or c or g or t
tacacatcnncaaaaatanntgctttccaaaacatcattatatttaagtgacataacttaaattcttcttcacacactagctataaataaatagaactgatttaccaggtttaagtcaatttgatctaatgttaatcagaactttaatatttagacttctgcttttcctaattatctttctttcttcaatatcttttttggaggccctgacagtcctcatttattatcacttgtcctttagctgaaagctaattttatataatacaaagaggggaataccttaggaaagaccttataaattacataatttataaaattacaaataattttataatttctaagattttgtgacttgtgcaatctctggaaaatttgtactataaatgtgtaagatatatttttatttctaattgcacttaaattttatataattcccgtttccttttctattctctataaaaacaaaatcttcaggctctctaaatataatgaaggactgtatctagtggcatttcacaatgagtttcttatgatataagaaatgtcactcaaacatttcatcacacaagttcccactgtttcctgaaagatgcctcacattccaaagccaaacatttcagctcaaggaaacttgagatcgacatgtnnnnaggtacaaaagcatcattgggatttgaggca

SEQ ID NO: 10139 - DNA, 590 bp, Canis familiaris
  misc_feature (1)..(590): n = a or c or g or t
agtctcagaacgagctgcagcagatccgactgtnntnngagaggaagaagatggccattaccgaggtgtgggacggcgtggctgaggtacacatggccctgaacaaccaggccactgggctcctgaacctcaagaaggatatccggggagtactagaccagatggaagacattcagctggagattctgggggagcgtgcccagtgccgcacccaggcccggaaggagcagcagatggcgtgcgtagcgaaggccaggccgcagctgggatgttccgagggcctcaaaggccagctctggctgctggcgctgaggctgctgctgggcgccctgctggcctgcaccgccgcctacgtgtacgtggtggaccccgcgcccttcgaggggctggtgccgcctctgctgagccgcgccgccgtctggaagctccgggccctgctgggcccgttcctgcgcctggaggtggacgacttcctgcccttctaggccggaggcccnnnggccccagcgaggaggccaggcggccggccggccccggtgcccacggcactgccgcgcagcgtcccgccaggagccgcggagaaggggggc

SEQ ID NO: 10140 - DNA, 495 bp, Canis familiaris
  misc_feature (1)..(495): n = a or c or g or t
gcgccccccagcannaggcccannnagagtggctgcaggtgcccgaccccagctacggcccggctggttcgagaggctctggtccgaggaggcctggacaccttnnnggccgatgccagcttcgtcatggcaacgggccaggccctggcagatgcctgccggatggaacccgaggacgtggaggtggcggcaacagagctgctcaagaagcaagagtccccagagggccgggccagtgcgctgggacgccggagccgcgggtcctcgctgggcagccttgacctgcatctgggctcccgggagaccctggtgccccccaggcagtgaaggcccacgccgcagcagcgtggcttagggctgccatgaccaccggagnnnnagggggtgctcaggaggaggcgggtggacaggccctccccccaccagcaagaggcccggctggatggagcttctaatgtcattcaaacagggccagtccctgccannnnnnnggcg

SEQ ID NO: 10141 - DNA, 685 bp, Canis familiaris
  misc_feature (1)..(685): n = a or c or g or t
aagtacatgctgctgtaatnaaattgcctnnnatcacttaccaagcntnnncttgactcgagcagtgaatgcctataaacataataaatgaaaagaagctagtatttttataatataaaacagtatcatttatagcttatcagtcatgtattgttgtccagcaaaaaaataagtccaatggagagttaagttatcttcacacctgccaatggtggaggctatttttgttaagactgtcagaatttactaaccgcagttacgacgtagagtccaaagagtgcagtaacctccttatcatggtaattaattgttctcttctgaagatctgtgttgtctaattgaacaataattcaggtagagcgtcccagaaaaaaccacttggactcccgctctggagtctagctggcggctccgagccctgccaggggccccgactcggcctgcctcggcgtcccctgagaggcctgaattctgctcgcagcttcattaccactgggctggaaacatccttgggttgagtgttttgtttgggagttatttcatgagggccttttaaacagtagtgtcccaatgaagtactagatattatttatgtaagaatgagcttttttttttttaaacaatatcctttcaaaatttctaactactttgtaactgcatgacttaacctggtgataaaagcagt

SEQ ID NO: 10142 - DNA, 622 bp, Canis familiaris
  misc_feature (1)..(622): n = a or c or g or t
atatgccagccatngataannnnnnnatccgctcccgnnagannnnnccagncttccacggtgggtaatcgtcagcagaaactgacatcagcattccagcagcagcatttgaacttcagtcaggttcagcactttggatctgggcatcaagagtggaatggaaacttcggacatcgaaggcagcaagcttatatacctactagtgttaccagtaatccattcactctttcccatggaagtcccaatcacacagccgtgcatgcccatctggctggaagtgcgcatcttggaggacagcctactctacttccatacccatcatcagctaccctcagtagtgctgcaccagtggcccacctcttagcctctccatgtacctcaagacctatgttacagcatccaacttacaatatctctcatcccagtggcatagttcaccaagtcccagtgggcataaatccccgtctgttaccatccccaaccattcatcagactcagtacaaaccaatcttcccaccacattcttacattgcagcatcacctgcatatactggatttccattgagtccaacaaaactcagccagtatccatatatgtgaaaactcaaagagtatattgagg

SEQ ID NO: 10143 - DNA, 459 bp, Canis familiaris
  misc_feature (1)..(459): n = a or c or g or t
agccccaccagaaggtgnaggcacaggtttatatcctcagcaaagaagagggtggccgccataagccttttgtgtcccacttcatgcctgtcatgttctccctgacttgggacatggcctgtcgggttatcttgccaccagggaaggagcttgctatgcccggggaggacttgaagctcagcctaatcctgaggcagcccatgatcttagagaaaggccagcgtttcaccctgcgagatggcaaccggaccattggcacaggcctggttaccgagacaccagccatgactgaggaagacaagaacctcaagtggagttgagtctggcctctgctctggctctgttgttggaaggccgcaccgcccagcattctctcctagctctgatgctccctccccagagcgtgggttacagcccagcggtgcagctagactgacccttccctggtcaggaggggcc

SEQ ID NO: 10144 - DNA, 554 bp, Canis familiaris
  misc_feature (1)..(554): n = a or c or g or t
tctgtgcagaagcttantaccagaatctcttcaccctgtcccagnnnnncaaatattctccagaaaatctagatgagcagattaagaaagtgtcccagcaggtcctagaaaagcaagcctacatctgtgcccaccctctggacaggacgtcctgaagcaaatggacagtgttccctactgccccgaggccacaacccatcgctggtcagctctttctccgggaggtggagcacttggaatttttacaagtggaaatgttttttcccagtatagaccagaaggactttctcctggcctgggggcggagcttctttaggctttgccctgcaggcactgccacttgacctgatcccaggtgctgaagagacaggagagagaatgcagttggtgacacctgggagctgaggggcttctgctagtttaggagacatacagtggcaacgggcttgtgctgctgcctttgcgtcaggaggttggtggggacctgttgcaggcatggatagctacttctgcaagaccagctgtgttcatagaacaaatgcacttaacctgtg

SEQ ID NO: 10145 - DNA, 672 bp, Canis familiaris
  misc_feature (1)..(672): n = a or c or g or t
aagancagcacccagcaagcttcagaatgctccgtgggtgccaacagagaacggactgacctcccagctggtttgtgttgcaccctggccaggatcagctcctagacttaaactccaggcagagggtttctgtgtacacgttgacacggaaaaacacggatcactttttgtcccattgccacatccgtagacgagtactttctactttgttcacttttaagttttaggaagtctgcctttatgcattttgatcctttacatcctttcttcacccttttggaaaggcatcttcccagtgttggggtgttgggaccagtcagggctctgtgtcagaaaattaaccagcccgtcctcaacgaccacacagagcggttgcacctgcttcctacacatctctgggaccatcgtcttttctactcgaatcatctcaaaaatggcttccattctccatctagtctctgtaaatgacacgacagatggtttatagactcgtcaaccaccttctgcatcgaaattctacacgtgtgatgtgccgcatatcacctatgatgtaaagggacaggacgggtggtggagagattatgggagggtatggacaacagatatttttgtatgtaacccacgcaataccccgaggcgctgagaggtgtgnnngaataaatacattnnnnn

SEQ ID NO: 10146 - DNA, 698 bp, Canis familiaris
  misc_feature (1)..(698): n = a or c or g or t
cactacaccggtatgaagcnntacaagaagtttgagatnnnnnnncggttcccacnnnannaggtagatgctcagaagggnnnaccaggagtagagaatatatccaggcaggtnntgctgnntgcgggcttcatgccctaccccccctatcccccgtgcccaccaggcaggaagggggactccagaaactttggacacccaggcctgcggagcacctcccctgtccacgaggcccctgggcaggaccagctgtaccattgcaggaaggagtaccacccacccccagctcaccagcaggagaccctggatgtgggcaggttccacaggctgccccagctggaccaccccaaccttatccaacgcaaggccatctcagttcctcttcagaaaccccatctgtgccctgggtgaaaggctgcccagaacacactggcccagcaacaccatctatagcagccaaggcctgatccctttctacatggggttcataccatccatgcaagacaactacgcaatgacatttggcaacagtacccgcagggcctatcagaaggaaatggagaggcaacaccagacactatgaaaatgctttaatggtggcatctgtacagcatgtgacgtccagacaggaaaaagagcgagtgcacacagagacacggctatcagagaacaggtnnnnnngaataaagagtcncann

SEQ ID NO: 10147 - DNA, 617 bp, Canis familiaris
  misc_feature (1)..(617): n = a or c or g or t
cagctgaagtgccaccgtgtccagcacttttagggttcattcntagagaatcgttcttcagcctgttcttacagtcagtttcagagagtcaggactttattttcctttggtagtactttttcctggagttgaattcagatgtttttcttaatgttccattaatgcttccttaaaaatcctcacttggttttattatagttcatttgcccttctttttttccattttccagactataaataatcctgagtgagagttggggtggttgggcttggtgtcttccatgtctaccccttcatgcacagctgaatggggaccatttgggtttgagctctcttagaggtgattggcaggaaagacagacacgaactagtggggaggtctcgtgaggccgtgggatcaatgtggagtggcttgcctggttctccacttaaactggtgtgtggggaaacattaacacaacctccctgacatgcaaggatttgcccttgtgctttctttccatactgtcttgaataaatgaaaagggaatgttggcacctatcctaatcccatccccccacttacttggggtgcttatgggacagtgaagaaatgtcagaccaacgtatggttctga

SEQ ID NO: 10148 - DNA, 516 bp, Canis familiaris
  misc_feature (1)..(516): n = a or c or g or t
tcttccccagtggctcctctctcttcagctctgcctgttttcactttactctcagttatccttccttgagccctccctggctgcctcctctccctcatccgtcagacacaatctgtgggccgcccctctcccctggccgctaagcagcctccattgatttccgctcgtgtttataggatttccacttagccgtgatcagtagttaagcacaggaaaatcccttgccaccccacctcccttggtcgatgccattgattctgccagcagctcctaaaccgccttacagctgagttagagatgaggggaggcagcagggatttccctgccttggggtgtggggagtagcagcaggttggggaagtgggtgggaatccctgttagaannnnnnnagttctggttttactttgctattgtgccctactctggtccaaatggtagagtgcctcctttagaggtttagaggcaaatttgctccccaacctggagagggtagaaatgaccctcctttgttgaaa

SEQ ID NO: 10149 - DNA, 675 bp, Canis familiaris
  misc_feature (1)..(675): n = a or c or g or t
cttcntacttccnnnctgcccacctgccagccttcctgctctcctgctctcntgttcttgcacttgagattgtgcttctgtgtctcacccttttccaagattccttcttgtttgtctgttaccaatctcctaccgaggtgtcactctgactgttgatgcaaattgtgatttcttgcctgtccttcacgctgtctgttgtttacctgtcatggttccttgctgcctacttgtctgttcctgtaatgttttctcttgctgctttaccaagttacacaaacttagttccttcaaagagcacaaatgggtaatcttgtgttttaggagatcagaaatccaaaatgagtctcactgggtagcaatgaaggcatgtagatgctctaagggataatgtcttctcttgcattttctgccttctcagaatccactcttagggctatcaatgaggggactaagcatcctcatttatcatggaaatacacttttcttcacttcaactgagtcagatgttaaccataactatcaaatttttagcgtaatatctagacttgtttaattaaacaaggnnnnnnccagccaatccaagtgcacccggaaaccaagacatgtcagtccacgtttggtccacttggcattcacacattcccttacaccatacttcgtccctaactaagtaaa

SEQ ID NO: 10150 - DNA, 393 bp, Canis familiaris
  misc_feature (1)..(393): n = a or c or g or t
tncnctnngggcctctgcagaagggctctgaccacactnnntaaactctgccctccctcccggganncgccctcgtttgtggatgttgtgagccaaagcaggcctgccccctgccccctgccccctgccccccaaccccccacccccaccccaggccacgtgattgtatcggtgattgatcctgatgtgctggtgctgtgtaccccacctgggctccgtcctcctcggaggccccttccggtgacactacctggggctcgggcccggccccgcagttcacggttgttcctgggagcgtcctctcccaccacatctgtaccttggaagctgctgctgctgcttacagaattatattttttcttttgaagagttttaagaagttgtaactttttg

SEQ ID NO: 10151 - DNA, 598 bp, Canis familiaris
  misc_feature (1)..(598): n = a or c or g or t
tccccattngtagaatgaacaggtgaggctagagcagaggttttccaatgttaaagaagaaagcangnntgctnnagctgaagggagggtnnagggcccagaccccgtcctctaggcaatgttgggtgcctggtttgcagccctgggctggctgctccccagggcctgcccttgccagctcaggcagccagagattttttttttagttcccacaaagggtggacatgggctttatgaggggtcaatgtcaaggacctagggagactctggctgtgttttatcctaataagttcatcctccttctctccttcctctccctggcccttgaggagaatgaaggaggagagggttttctatgactgtgctagcttttattatcagcaagagggctccttttgtaatttgtgcatgaaattcatgtcatttcctggggagaggagagggctgcctggagagggtggggggcacactgggggagcagacaggtttccttcccttgtgggggtggggaggggaagagagggggtgctacccagctcacctgatcagggctctcaaaccagccgttttgggtnnnnnnaaaagtgggaaccttcct

SEQ ID NO: 10152 - DNA, 624 bp, Canis familiaris
  misc_feature (1)..(624): n = a or c or g or t
cctatggcttgcattgaactcatannnnacagtgctgctctggattctagacggcttggcataggcagtgaggtgccacatgtggaaggtgattcttccaaacatccaggtagacagaagcagcacacatattttcactggagttaggagcactatgaggcacagaatgcccagaaggcagaagatttttctgtgtaaaaaccaatatgtataagactccaagtaaaaaaacaaaagcaaacgagccccaaaccttgttccttcggctttgcttagaagctgctaactttgcacttatttttcaagcatcttccacgtgccaaggatgttggctacgtgagggtgctgggcatatttgcttccctttaggcaacattctcttgtggtctcccctccccaggtattgtttggtctgtttggagctgggtgtgttgacatacggtgtagatcttgccgctcctcctggcccttggcagagcctgtcgcctgcgcccacctacccnnnngttttgatgttggctcttgaaagagtttgtatttattttattttgcactagtcacagttgttgtgaaaatatctcaactgttttgggagagattgcctgtgatggaaagagagatgga

SEQ ID NO: 10153 - DNA, 548 bp, Canis familiaris
  misc_feature (1)..(548): n = a or c or g or t
tagaccaagancaattaanccacagcaacaaatgcgtaatatcttcagtcgagaanagagtctttctnntggatcaagaaaataagcaatngcgggaaatcagcctccggcttacacagcacgttggcttcttaaagnnnnnnataaagagcatgcagatttatgaagaaaaggagacaattaatgacgtccctgaacttgaagtatggagtaaaatcttgcccttatcaagctccagtttttcaggaagaggtttggtacagtcagtcagaaaccttcaagagcttgaggaacgtaagtcagaagaagcaatcgcaaaccttgaagtcccccaagtctctttagggttcacagaattctgaagctggatacataaaagtgactattctgaaagagacacagtgcatccaagaacaagaccaaaagtcagaaccataaaatcactggtggctaaaactagactgatcgaagctgctaacttaaagcttgggtgtgagggtggaacatgacatggagaagaattaccacagatccccactggacatcaa

SEQ ID NO: 10154 - DNA, 636 bp, Canis familiaris
  misc_feature (1)..(636): n = a or c or g or t
ctgctaaaagctgctaactggtaatggtggattgtggtgagcagatgggggtgaggccagggaaccctctgatcctttngaagcaattccctggncaaggaaagttgtgtctcaggaaggtggctcctgtgtgtgcctgggtgtggttacgacgtggcccagagcctaccctggagctgtcagtccaggcaaagccaagagcatctgagcacgtctctgacttcccagtggcagcaggttgctcggagtttgaatttagtgaaacagggtgtagttcttctccgcactctgtgtggtctggccgtgcaggtagggagaagtcagtcagtctaattaaagattgtgcagttcctagtgacaggtgccaagaggtgatgatacgggtttcttgggtctgatgtacagtgtgaataaatgcttgcagctcttagcccttttcgatcaatgaagcacttttttattaatatttttctttgtatgtaaaggaggaaccgtaactctccgtagctgtacatataataacccttttctcctaaagaggagtcagtgagtgctcctatatttttcattttttgtcaaagcaagaagtaaatactttagaactgttaaatatataaataaagtgaataaagtnnn

SEQ ID NO: 10155 - DNA, 644 bp, Canis familiaris
  misc_feature (1)..(644): n = a or c or g or t
ccttgtgtaaagccttgcatgnnntacagcagaatccagctctgctacaccagnnggcaagtnnnagccccctacaacaccatctgccactacttcccatcctgaccaaccntcgagcgctgcaggccttgatacagatagaaaagggcctgcagatactgtccaaggaggtgcctgggctgggacgttgtttgtgggacccaggtagggaaactagagaaccctctgagactagggatggagggcagggtcagagagcaggctctgtgcagcccacctgggctgttcttcagcttctctatgcactagccaaagcctgttctcagtccacacaatcttcactatcctcattctccctccctgaaggctgcttccagcaagaactggagcatctgaaggccatgggttttgctaaccatgatgccaatctacagaccctcatggcagcgggaggagacattcaggttgccattgagaagctactagggctaccagaggcccaggtgccaccaactgatgcctacagtgtaccacctcatggagagggagggaaaggaagggaaaggggaaggggaggggaggggaaatagcgtattttgaactcctcttactcagatcatgtgcacacttgaacagccctcctc

SEQ ID NO: 10156 - DNA, 575 bp, Canis familiaris
  misc_feature (1)..(575): n = a or c or g or t
gtgacccacatgacatccggncnnagcggggtgggtgtcgctgtcancatnnnnncctgccnnnngcagatcgaccagcagaactgtacctgtngagccacttttgtttcttgggcaaaaaaatggnctgattgagagtattgttgtttttgtacaaaaacagggacaaaagaaaaggcgacagagcaaatgcttaccctccaagacgggaggctgagatgcctcggtgttaaaatgacaactagaaggaaaagaaggccagagtgggaacccatgagcctgtcagagtagtcccttcctgggaggggggtgtatgaaggagagagcccctgcacccgccatcctgacaataggcctgggtcccctcccagcagccgccacctccctttggggcaaaagcagatgccgaggtcaggccggtttttgttccttgtgtctttgtgattggttcctggaggcctgggaaggagccagctgaggcctcgagggtgaggctcccatggaggtgtggaccccagggatgggcctgtacatagaaaccactggatatctctgccctggacagtctttttgtc

SEQ ID NO: 10157 - DNA, 539 bp, Canis familiaris
  misc_feature (1)..(539): n = a or c or g or t
tctcctgnnngccctgcccantagtttttccnnngctgaccatggaacagtggtttgtacttctcccttgaccgaagaccaaaaattagtttggannnagcttccttgtctggcacctctacctctctacttggtagggatttggataagagaattctagagcttagcgtagtcgagggcttcgtgggaccagctgcagaggggtggtctctgagctctccgtgccaggtccacagactgcagagagcacttcctgtcatggggttcgtcgggggcaggtgtgaactgcctggtggcctcactccacatgtctggcctgtgctccgggcatcggctcagtgttcagagcccacaccccgccccaacgagtcctgcagtgtggtccaaaactgcgggccctggggccctgtgtcctctgcggccctgtgtcacactcggcgtcacccggccaggtaaccctcctggcagtccagtcccgttgcagccatatccccttcaacttgttttattctccttttcctgatacttctgtgcgtatc

SEQ ID NO: 10158 - DNA, 532 bp, Canis familiaris
  misc_feature (1)..(532): n = a or c or g or t
gctgctgagatggctagaaagttggagaagcaggagaagaaacgcttgaagaaggagaagaaacggctagccgcccttgcccttgcatcttcagaaaacagtagtaccccagaggagtatgaggagacccaaagtgaaagacccaaaaagaagaaaaagcaaaagccccaggagactccacaggagaatggaatggaagacccatctgtctccatctccaaacccaagaaaaagagatctttttccaaggaggagctggttagtagtgatgttgaagagacagctggcaatgtaagtcttcccaagaggaagaaatcttttcccaaagaggaaccagttagcgatgctgaagaggcagtaaacaggagcgtccccaagaaaaagaggaaattctcttctaaggaggagccacttagcagtggacctgaagaggctgctggcaacaagagcggcagctccaagaaaaagaaaaagctccagaagctatcccaggaagattagaatggacattttaccaggtggggnaaaccca

SEQ ID NO: 10159 - DNA, 618 bp, Canis familiaris
cttgctcagatgccctctgtccactgagccaacatgaagcccgagatccagctggggatggatggggagggcacactggttgattgacaccagcacggttggccttgccctccagcaggacatctgaggggacatccagctcctagtgccaggagaagccttcgtgggtctcctgccacaggctgcggctggggctggaagctgtgttgtgccgggccccaagcaggcctgcagtattatgggcgggggggcccccttctggccctcctcacagcggcacccccagagtactcccgtggtagaaaagagtggagaccacaagttggaacgcacctgactctctgagcatccacgaggccttgaaactgggggcctgctgccccccctcaccggaagcctaatgactggggttgggagaaggagggcccagcgtccgtcctcaccccgagcgctgctttgtatagtcccaagcacacatggcaggcatcgcttttggttctggtgcaagttcagaacaattcaagtccatgtgccctgtgacgggccagagccctgggtccagaccacgcagcccaggggaggggatgaggcatcatcacccaccagatcccctccttt

SEQ ID NO: 10160 - DNA, 432 bp, Canis familiaris
  misc_feature (1)..(432): n = a or c or g or t
ctnaccgaaatgntnntgcgaaattactgaacttctatagatggactgtgnaaacagccagctttgatttattgctgaagacagatgacgactgttatatagacttggaagctgtgtttaataggattgaccacaagaatctggatgggcctaatttttggtggggaaatttcaggctgaattgggcagttgaccggaccggtaagtggcaggagctggagtatcccagtcctgcctacccagcctnnnnnnnnggttcggggtatgtgatctccagggatatcgtccactggctcgccagcaatgcgggcaggctaaagacctatcagggtgaagacgtaagcatgggcatctggatggcagccattggacctacgcggtaccagggcgtgatcccggattcctgggaccgagttctgcatcgggctcctt

SEQ ID NO: 10161 - DNA, 355 bp, Canis familiaris
  misc_feature (1)..(355): n = a or c or g or t
ggggggtgggggnntggctgggggagcagcccttcnngtgggggtgcggggcagggtgcgcccggggccccccgcagccgggccgcagcgtcccctccgtgccctgggggggcaccgcgttctgagcacctgcggctcaggggactggcaggggggcctgagcgggtctgggggcctgggnnnnnnctcccctccccggcccccctgcccgcaccctcagccgccctgtgggggggggcccaaggccgagaggggccgtgcctnnggccttggctctccctcggaggaggaggaggagtcgggccccgtgtcctgggccgcaaaccggtcccctcctcgtctctggcatgaactt

SEQ ID NO: 10162 - DNA, 668 bp, Canis familiaris
  misc_feature (1)..(668): n = a or c or g or t
ctatgtgagtgcatgnncaatgccacctgtgatcacgtnactnntacctgttactgcagcnctggattcaaaggaatccggtgtgaccaagctgccctcatgatnnannagctgaatccctacaccaagatcagcccagcgctgggtgcagagcggcactcagtgggtgctgtcacaggcatcgtcctcctgttgttcctcattgtggtgctgctgggcctgtttgcttggcgccggcggcgacagaaagagaaaggccgtgacctggctccccgtgtctcctatacacctgccatgaggatgaccagcaccgactactcgctctcagatttgtctcaaagtagcagccatgcccagtgcttttccaattccagctaccacacactggcgtgcggggggcctgccaccagccaggccagcactctggacaggaacagccccaccaaggtgcttgtggaatggacagacgtcagaacacatacattatggacaaaggcttcaaagattacatgaaagaatccgtgtgcagttctagcacttgttccttgaatagcagtgaaaacccttacgccacaattaaggacccacccatcctcacctgcaagcttccagaaagcagctatgtagaaatgaagtcgcctacgcacagggggtctccgtatacagat

SEQ ID NO: 10163 - DNA, 592 bp, Canis familiaris
  misc_feature (1)..(592): n = a or c or g or t
angagctgcgtcgacatggtcatgaagtggctggtgcctgagagcagtnnncgctatgtcaataggatgaccaacgaggcgctgcataaagggtgctcactgaaggttctggcnnacagtgagcgatacacatggattgtgctgtgagggcccggccgctctggacactgactccaactacctccgcggcctgggagctggccgcctccctggcagcctctccccggctggccggcccaccgatgcccgactgatgagcggcactcgtgttaggctgcggggaagggggctgggcggggcagcccctggtggcccgagagtctggacgcttcttatttatgcctatttaagttgggaaggggcagagggagggagccccctgccccaccagcctcaagcgcccatcttcaccctgcgctgggcacaggccctcgttctctgcgcctctgccccctttccttggctacagctgtggacattacccccctccccctcagggaggccagttggacctccttgtcctgccctgcccgccccagcctccccactcacccgacactgaggtggccagcctcgtggccatcccctcccc

SEQ ID NO: 10164 - DNA, 567 bp, Canis familiaris
  misc_feature (1)..(567): n = a or c or g or t
cccagtnctctatccctccctttcgacatggtgtttccatgaagctgaatngcagaaaaacatatacaatgattgggaataatgtaattacctgtattgatggaatgtggactgaacttcctacgtgtgttgcaactgaccaacttaagagttgcaggaggccagtgttttctgcaagaatactgatgtatccacataggaataaatttaatcacagtaccagagtaatttacagatgtttggggaagcctggatacaagcaaacagtctgcataaatggccaatggcatcctgaactacactgcaaaagagacatggaacaactctgcccacctccacctcagatacccaatgctcagaatatgctaaccacagtgaattatcaggataaagaaaaagtagctattctgtgcaaagaaaattatctacttcacggaccaagagatatagtgtgtaaaaatggacaatggcagtcattaccacgctgtattggttagtagtttatttctaaataatatgattttaaaagtgtatactaaagaacaggaaaaagaacttctgactttt

SEQ ID NO: 10165 - DNA, 567 bp, Canis familiaris
  misc_feature (1)..(567): n = a or c or g or t
ggtgcgcaggnacacgctnnannanngcagtgagctgatctcctgcattgagaacgggaactatgccannnnggccaggatcgcagcggaggtcggtcagaacagcatgtggatttccaccgatgccgcggcctccgtgctcgagcctctgaaagtcgtgtgggccaagtgcagtggctatccctcctacccggccctgatcattgaccccaagatgccgcgtgtgcctggccaccacaacggggtcaccatcccggccccgccgctggacgtgctgaagataggcgagcacatgcagaccaaggctgatgagaagctgttcctggttctgttcttcgacaacaagagaagctggcaatggctccccaagtccaaaatggtgcctctcggcatggacgagaccatagacaaactgaagatgatggaggggcggaactccagcatcaggaaagctgtgagagtcgccttcgaccgcgccatgagccacctgagccgcgtgcacggggagcccagcagcgacctcagtgatatcgactgacctgcccgcccccccgtggccttgtccgt

SEQ ID NO: 10166 - DNA, 480 bp, Canis familiaris
  misc_feature (1)..(480): n = a or c or g or t
acagccacagtcacnnacacactctccctccacaaggtgccagaatacaacancagcatgtggctcctgtnnaggaccagcatacnnnnngccacctgtcacccccagactcctggaaccaacagaagcaaactaacgcacaccacggcccagaataggcctggacctcaaagnntgcatgaaaggggcgggagccacatagactcccacccagctcataagaaatgacatttccaaggtgcagagagaaagcaaagtggctggggtcccatacgtgtgctccccaaactcccaactgtcctgaagctgagctggacttggctgcagagccatcatgcacatcctgaggccacccttggctcacaggtgcccatctcctttcatcctgccacccaagagcagtgcaagcttctttcctcctactctctgggccaagtcagggtcaagcttgtgcccaagcnnnnnggtgtctcctcactc

SEQ ID NO: 10167 - DNA, 452 bp, Canis familiaris
  misc_feature (1)..(452): n = a or c or g or t
acgcttaaatgtgtgtggctttannacgtgtttgcaaaacgtctgttctcttttaatgttgtaagttatttggacccacttttaaaaacaatcaggagaggatttttgttttgatttgtttgacctgtatgttttggcataaagattttggtagctttatgcagctgattggaagactttgtcctatgatctgggacaggtgtttaaaaaaaggaacacatcagtaaattgctttggcgccaagaaaataaaagcgaggtggctattatttggtctcctaactaacccagtttgtaagttaaaataaaagcctgtataaattaaaatagaactgtaattgtctacatcctttttcacctgaagaaatatttgtatatttcccatatataagtattatgcatgatgtaagcaacgtacatgttgtattttctctgaatagcacttttttggta

SEQ ID NO: 10168 - DNA, 627 bp, Canis familiaris
  misc_feature (1)..(618): n = a or c or g or t
tgggttgncagagttgaagacagggccaaggggttggggactggagactctcaagagttctgagaagttgggggtnnagtttgtggggaacagagctctaaggtcaggtcagtgagatagtcccagtttggaaaccaggaggcccaaggttccaggaagaaattgaagttgagggaaggaatgaaaagggtcaggggtctaggggggaagaactctgtcgagcaaggagacccttcagcctcacatcccctccttcttggcggccttggaagagggggtccagactcaaccatatggaaagatctttcccttagcggttctccaacctgggcgtgcatcaacacagctttttcaaagcatgtcatggtgacttgttaaagcagagtgctaatttctggttcactgggtctgggggcagaccaaaatgtttgctttcctaacaagttcctggggacatgctgttgctgtgggttacaagtgagatcacctggagaaccatggccttaaggcaccacagtctgctctgggggctctctgttacatagactcacttatcagatagctatcagctctcaggagtagaaaacccacactatcttcctctggagattcaacacccatttaaaa

SEQ ID NO: 10169 - DNA, 499 bp, Canis familiaris
  misc_feature (1)..(499): n = a or c or g or t
ggggcaacagatcctgccacagtgnnntgttcagcaaaggcggccggggcaagcagctcaggnnnaagtttagtcacaacaggaacaacatgttatcctgtttctctgagtncngagtgcccggacaacataccaaatgcttctaaagttgcctaatagtagcctttctccacttaaaataccctgcccttccaacccgctcaggttcctgtggcgtggtctgatgttcccagagcatcaggaaataacagactcctttgtccctttatccttcacctcttgttcacaaaatgaatttattgccctgcctttagattctcataagcctttgtgaagcggatgttgccttccccttcctgtttctgtgcctgtttgaagctcctacttccttcctttctgggaaagatctttcagagactagctcaggcctctcttcaagtactgtattgggtaccagtgttttgtctttagctnnnatacgtgattgtgnnnnnnttct

SEQ ID NO: 10170 - DNA, 596 bp, Canis familiaris
  misc_feature (1)..(596): n = a or c or g or t
gtaacctacttgtttcaccagagnnntagtaagtacatgcctgaaactgaaaccatgtgcactttcagtcacttcacagtaatggagggtaaactgaacttttctcttttcaaacctagatgggtcaacaagcaacataacagaagacttgggggagaaggaccgcacactcagtccatcgaagagtccttggaacaagcaactggctattgaaaaggcgcagttgtgtagcagttgagtaatgctggttagctgttaaggtggcgtgttgcagtgcagagtgcttggctgtttcctgttttctcctgattgctcctgtgtaaagatgccttgtcgtgcagaaacaaatggctgtccagtttattaaaatgcctgacaactgcacttccagtcacccgggccttgcatataaataacggagcatacagtgagcacatctagctgatgataaatacacctttttttcccccctacccccaaaatnnnnatctgatcatcttcatgtatgaacttaaaatacggaaaatgttaaggaagcaaaatggtttgtaactttgtaagtacttataacatggtgtatctttttgctcatgaaa

SEQ ID NO: 10171 - DNA, 406 bp, Canis familiaris
  misc_feature (1)..(406): n = a or c or g or t
ctcccccagaagannagctagacggacaagttccaggattaaggaacagggcctagagaataactgtcaaccctgaatatagcacttgaaaaataaggaagtcaatgagttctgaaagcagatactgataaaaggagctgtgatgtagctattttgcaactgctgggaaaggaggaggactctgccttcactgctgccaccataggacatgtgcttctgctttttaaagttctgtcctggaatattaaaaagccagctttgaatgaactgtcctacaaaattaagtaccatttataatattattgccatggaatatacaaggggaaaggcaaggcacaggagctatggcacacaggctcatgcatagagaaaaatcacgagattagggtgaaagtacgtaacacaa

SEQ ID NO: 10172 - DNA, 125 bp, Canis familiaris
  misc_feature (1)..(125): n = a or c or g or t
ggcttcaaatcattttttaaaatatgtgttnnngggatccctgggtggctcagtggttgagcatctacctttggctcagggtgtgatcccagtcccgggatcgagtcctgcatcaggctccctgc

SEQ ID NO: 10173 - DNA, 512 bp, Canis familiaris
  misc_feature (1)..(512): n = a or c or g or t
gctcctcaaagtgttctccatnnacaagcagcatcacaacnnnncnnagnctgtcagaatgcaggatcccaggccccaccccagggcagatgaatcagactatattgtaaccaggtccctggcagacgtatagacattgggatgtaaggtgtgctagtccagagatggccaccaggtccttgggggaaatactgctcagttacttttccacatcgcttgtcatcttctgatctagtttatcaatattcgttttctgtccacccccgcccaggagagaatgtaaattccctgaggccaggatttgatctgttgtactcgctgctggatcctcggtagacacagcacaaattcattgaatggaataatacatatttaggggcacctgggtggctcggtcagttgagtgtctgcctttggctcaggtcatgatctcagggtcctgggatcgaggccctcgttggactccnnnctcagccaggaatttnnnnnntctctctccctctccctcccct

SEQ ID NO: 10174 - DNA, 510 bp, Canis familiaris
  misc_feature (1)..(510): n = a or c or g or t
tgttacctgccttcgatgccnnngaatatatttnatggacaagatcaaaattgtgttcttaaatcgtaaatctgagaattctatttttaatatttatttattaaaaaatcaccacacagtatactctgtaaagtttccttgagccttccaatttatactctgattttcaatctcagctggtaaaccaactttgtacttagttattcattattcagaacattcctttcgtttccaatttagtttaactgaaatttgctgctgatattgttgagtttgttctttaaaaaaatatctcctatatctgttttcctcctgttttagaacagacctaactagtgaatgtattaatgaaaatgcatccatttcagagctgactttaaaagtttagtttttttactttacaaactgtgaatatgcatatgccagcagcatacagtgtaatagtatctaaataaatttcactgtaagtctagatagacctttttgaagtctgtataaacttgttttgaa

SEQ ID NO: 10175 - DNA, 597 bp, Canis familiaris
  misc_feature (1)..(597): n = a or c or g or t
ccctccatcttcacannngccattgacacaaaggcccctgaaaaggccagcatccaccggttgatggagggcttcctgctccggctgcaggctcagttcccctccacagtcagcactgtgtacaggaccagtgagaagctggtcaaggctcccagggatggctgtgctgctggcccccgctgcctgctctgtatgtgctcgctggatgtcgacactgctgacagtgccactgcttttggggctcagacccaggatttctcccagacacagccccccaccccactggctgaggctggggcagcccccatgccctgctgttctgcagaagtgggcagggcccagaagtgctgccagagtaccctgctgtgcagaagggaggactcccaggtcatcgagcagctatgctatggctgccgtgtgaatatgaaggatgtgccatctttggattctttgccaccttacatcttggctgaggcccagttccgcagccaaaggccctcgcaggatatccaggagtatctggttgagaacagtgacgaggaggtgcacaccactgggagctgagcctggggccacccccaagcaggagggcaagga

SEQ ID NO: 10176 - DNA, 362 bp, Canis familiaris
  misc_feature (1)..(362): n = a or c or g or t
agactgaggnnngtacagagtcccaggagccaaggggggccccnctaaggccaggatggaggcgagaggccaanncaggtagggggacattggtgagagcaccctggggctggaggtgggaccagagaggaaccgaggaccaggaagtgccaggaccagtagccagggccagagtggccaccggaggtcccccactcacgtgtgatgccaccccagtcacccctcccgttcctgaacagggatccgagaatgtgccaagagtcccgccagcctgggccatctgtgtgcaatagggagggatgtctctattttttgctgcccccttcttgcccactgtcaggggcagngggagaannnnnttc

SEQ ID NO: 10177 - DNA, 405 bp, Canis familiaris
  misc_feature (1)..(405): n = a or c or g or t
gtcgagcccctcatcagctgcccagggctcggggagtcgcaaaagagctgcgnngggccacaagtcatttcccgacacctcgcaatccactcttttggggtctaggaggaaaatgcgggcctgagtccgtagcttcctggcaagtcgccagcgtgccccttccctctaggctacannncatgtccatgggaaaccctaatctagccctgacttctgtggtcctggagggacactgggcatcccgaaagccagcatctggaatattcccaagccttgccccacagtttggcccaaaggtggctcgaggctgtgtcagatcccagtggctacaggccccaggacggtgcgcggaggcccgtgtcccatctgcctccagtcctgcagcacacaggactcctcctcgac

SEQ ID NO: 10178 - DNA, 508 bp, Canis familiaris
  misc_feature (1)..(508): n = a or c or g or t
gtgaantgctcttcattgatcttcacacagctcctgcagaatggtgaatttcttacaccagcgtttggtatcctggagtttgaccctagtctatgataaactgcttaagtttgtacaattttactttttgtgttaatgatgtgtgctccctctcccgcccttccctctcctcaccttttagtccttcacttccaattttgtggaatgatattttaggaaaaacagatttttaaagaagagaaaaagactgaatttccttgctttacttttgcatatacagactggattttttttttaacagccgtttccccaaaggaatgtgtcttgcttattactgacatttggtatgtttcattcattggaatatttcttattttctatgtgttgcaaaagcctgtgagaaacacaggatttgataaacatttgaaggcaggaaaaatccagattgtttgttctttgagagtcatgnnnaccttctggtgtgtagaaattgccattggaaaaattg

SEQ ID NO: 10179 - DNA, 96 bp, Canis familiaris
  misc_feature (1)..(96): n = a or c or g or t
agggaatacagtcaattgtattgtaatagcgtatggtgatagatggtagctacgcttgtaagcttggcataatgtanngagttgaatnactatgct

SEQ ID NO: 10180 - DNA, 623 bp, Canis familiaris
  misc_feature (1)..(623): n = a or c or g or t
ctatgctcacatctttggnanaagctccagagtnnnccagcangaactgannnnnnntgtcnannaaggccnnggcactttnnnnagagcgcaggggtttgcagcgctcactagnncttccccctnnnnnactgtaactcttgtctttcttgccagcaaattaataatttaatccacttttccaattttgtattagatgtgttgctggccaggaggagccacaggttcagtgggctcatggtgggagttgtgaaaaaatcaagggggatcccctatttatctagactacttagcttctcagaggcaggagacagtgtaggcacctgttaaaactgcaaatctacctaacttgctcacatgcaggtttgaggggctctcagtgctttctccacaaggtcctttggagattcaagttagagactacatatgtgggccttagcctggtcccatgtggcctagcaggaagccctatcaatgggtgccagtccaaagcccccatggactattccatgacctgtcctaagcagccacaatgtgagactgaaccgttaggagccagaactggccagacctaccttgtgagctgctcaggagggactttctgaatctagaactagtatctc

SEQ ID NO: 10181 - DNA, 548 bp, Canis familiaris
  misc_feature (1)..(548): n = a or c or g or t
tcnacccagagcagtgcattaangtccnntgcnncatcatccagaccnnnnactaccccatcaacctcgctgccatcaagatgcagaccaaagnnnncgagaggatcgccaaggagtccttgntgcagctccttgccgacatcancccgggcttnnnacagggttatgacaacaccgaaagtagtgtgcgtaaggccagcgtgttttgcttagtggcaatttattccgtaattggagaagagctgaaacctcaccttgcccagctcacggggagcaagatgaagctactaaacttatatataaagagggcccaaaccacgaacagcaacagtagctcctcctctgatgtgtccacacacagctaatggcgcgccagagtctcttcgtgtagccctagaagcaatcggtggtgcctctcagagaccttcccccaccttccccctcannnnnngcccagtcagtacaaggaggcccgcaaatatttattacaatcagtattttggtcccttccagcttttgtgtagaatcttactggtattgaatgtaaa

SEQ ID NO: 10182 - DNA, 453 bp, Canis familiaris
  misc_feature (1)..(453): n = a or c or g or t
tnnacaactcgtccgannacnacnnnnngctccctcaccgcggcctggnngacagctcggcggannngagctgcgacagccgggtcaacagcgactacgagacggacggcgagggctacacggacggcgagggctacacggacgtggacgaggggccgccggcgcccgctctggcccggtcctcggagcccgtgctggaggaggagccccggagcccgcgggatcacgggagagcctcgggtgcccgaggagcccaggtggacaggcacccctaccacagccaggggcgacaggacagcatgcggacgtatgggcaggaagccctgaagaagaagtttacacgagctcgagatgtggagtcctccgatgaggacggctatgactggggcccggccaccgacctgtgacccctcccaggttccctggggctggacctggtttcccactcagaac

SEQ ID NO: 10183 - DNA, 576 bp, Canis familiaris
  misc_feature (1)..(576): n = a or c or g or t
catcatcaaggagnngctgctagactatcatctgctcactgacantttcccctgccactnnnnnnnngnntnnnnnnncggtnnctgtgccacagtggtnnnnnccccagtggatgtggtgaagacccggtacatgaactcgcccccaggnnaatactgcagccccctggactgtatgctgaagatggtgacccaagagggccccacagccttctataagggatttacaccatcctttttgcgtttgggaacctggaatgtggtgatgtttgtgacctatgagcagctgaaacgggccttgatgaaagtccagatgctacgggaatctccattctgaataaggcagggccatgtggtactttgctggaacaagaaccactgaagaatgcattaaagcagtgggtccatgctcacacacacccacacatgtttacagaactgtttacttgctgctgagtcaagaaagagaagtggaggaaggattctggccttcagtgctttgtcttaagaacacatttgttttgcactgacaagatggaaaataaattatattaattttggggacctattaagttg

SEQ ID NO: 10184 - DNA, 314 bp, Canis familiaris
  misc_feature (1)..(314): n = a or c or g or t
cccgggatnngaatgtcaattcaaaaaagaatgaaatggaaatttcatttcaaatactgaaatattttataatctgtagttctgaaggagccagatcagaaagtgcaaatcattgataaaagtcttaattttgtttcaaaagcacaagatagaattgaaagatttaggaaaaagtcatttctttggtttaatatttggtctcagatttctccttggccaagatgtaaattagttaaaaggaaaaagatggcacttttgacacattcctatgttggnnnatgctgggctgaaannnnattgtgtgtgctctatca

SEQ ID NO: 10185 - DNA, 589 bp, Canis familiaris
  misc_feature (1)..(589): n = a or c or g or t
catttaggtcgggagtttgtagactgtttcctttatttaatnnacacctacagtttcacaactgtgaagctactttggatttgggacaagatggaaaaacagcaatacaaatctgaagttcataaagcttcattaataattgatttatttgggaatgagcatgataattttacaaaaaatctcgaaaatctcatgtctaccatacaagagagttactgttccaactggcgatgcccaactcgagtgcaggaagatcagcaacgcacaattaatataaatcctccccaagaaattcctcatggaaacttgatacgactggctgtggatgagttattctgttccaggattgaactgtgtgaagagagtgggtgtggtggcttaagagaattttcccagcgagttttctgccatggggcacccccttttgttgtcttaaatatgcagcattggaaatctgaagatctggcatatgtaccatattacttggatttatctgatcacaagtacttgttggaaggtgccacattatttaacaaagaggaacatcattattctgcagctttccagattgatggacattggatgcact

SEQ ID NO: 10186 - DNA, 626 bp, Canis familiaris
  misc_feature (1)..(626): n = a or c or g or t
aagggnntacacaantgactaaattgaaatgatgcgttttacactaaaatnnnnnnnccggcattccaaacngnnnncgannnncagaggttgtnnaatagtgagcatgttatgtttaaagctaaggaacattcaactcgagacagattttttngtagtcataaccatttagtgacttcaatggttttttgatgcccccaagtaaaatggaaacactgacctaccagaattcttcataacagtatcttatggaaaatgtgttctcttcacaaagtgttgcctaagtcattgtttaaagcacgaatattactcctggggtgcttttgcttccctccacttgtaagtgctgcaaactttagggcagcttccttcccttccatggcactgcctagttagcagaaatctaaaaaagcagacaccacctttcatgtaaacttgagagttgaatgaggtaaaatggcattagtgggccctatgttttcttaaagctatacaattgtttcagtgtcacttttatacatactttaatgtatgtaaatgtatcttcatgatttatactttcatttgtatctgctgggctggattaagctttgttgtgattgtgaccaatacatattcaggccatg

SEQ ID NO: 10187 - DNA, 125 bp, Canis familiaris
  misc_feature (1)..(125): n = a or c or g or t
aaanannnaaaaaaaaaaaggaanacgctccatacntagtcaagggtgagccaccccccaaaatgaggcannnnnnttccattaaacttgctcggaggctgcagggagcgtgcggtagaggcagc

SEQ ID NO: 10188 - DNA, 411 bp, Canis familiaris
  misc_feature (1)..(411): n = a or c or g or t
gtttttttcaatcactgacttanngatctagttttccatatannnnggtaatcatcaagtnnnctgannnntttcgnnagaatatataacacttttggnntaaaaattatcataagttgcnnnagtaattcttacactgtaaccaaagaccagtttttaaaaggaaacacctttccacaaacctatccctgggttatttttcgtactactttttctgttttacctggaaataatttacaaaaataacgtactgagatttgcactaaagaacaaaagtggaggggagtcagggacagtaagaagaggtatgattggggacccctggggggctcagcggtttagcaccaccttctgcccaggccgtgaccccagggtgctgggatcgagttccacgttgggcttcctggaggg

SEQ ID NO: 10189 - DNA, 612 bp, Canis familiaris
ttttaagacagaactttttttttttttcattttgttttggtgattccagcatagaattagttgtgagctttttagttggtatttcaattttgcttttacattttacttgtaatttcctccaataggaaagtcctagaatctttccagataaccacaggtttccatcctacgtaggtgctatcactaacctaattctcaaagaagcaggtagcatgggtctccctttcattgcaccggttaggggtcatgcaggtcacaaaggtctgataatgacataacaccactacctgggccagggaagctttgatttaaagtctccttcttggcattcacttcgaaaaaatctttggagaataattaagaacggaaaacaaatgttgtcagagaacttattccatcttttctccacacacatgcatatccacatacatattcactgactcctgtaagccaattatttatgacttaaaaatagatagcagtgtgcttgtggcgagagccaggcaaacacatcagttacaatgggccacaaccagactgagaatgtgtacttattccactttcttaccaacaggagtttggttatctaattatattcactgaattgtgcat

SEQ ID NO: 10190 - DNA, 687 bp, Canis familiaris
  misc_feature (1)..(687): n = a or c or g or t
cttcgtgcactgtgacccccaccctnnnnntgtgctggtgcnnnagtgcccaggcacagnnaaggtnnagatngtnntgctggaccacggnntctaccaggtgctcacagatgagttccgcctggattactgccatctctggcagtcactgatctggactgacatgaagagggtgaagaagtacagccagcgcctgggagctggggatctttaccccttgtttgcctgcatgctgacggcccggtcttgggactctgtcaacaggggcattggccaagctccagtcactgccactgaggacgcagagatccgtaacaacgcagccaattacctccccgagatcagccagctcctcaaccatgtgcctcgccagatgctgctcatcttcaagaccaacgacctgctccgtggcattgaggctgctctgggcactcgtgccagtgccagctccttcctcaacatgtcacgatgttgcgtcagagcgctggccatgcacaagaagaagaatgccagctcgttattcagaaggacccagatctctttcagagaggccttcaatttatggcagatcaaccttcacgaactcattctgcgtgtgaagggattgaggttggccagctgggtcttggccctgctttgctggctgttgcccactccatgctgagtggacctgctgtcccctttccc

SEQ ID NO: 10191 - DNA, 58 bp, Canis familiaris
  misc_feature (1)..(58): n = a or c or g or t
agaagaaagaggctggggcccagagtgtctctatnnntgggagccaaagaccccaggg

SEQ ID NO: 10192 - DNA, 529 bp, Canis familiaris
  misc_feature (1)..(529): n = a or c or g or t
gtacccaattggtaaggagcaggaatggataactttatttgggaacaaagacagttgctgtgacagtaatttgagaatctcaatcccaagagtcactcagggttatcttagaatgcaaagccaagcttataaatgaagctgccttaaagaagagggagcatttaagatagggtaaaggaatataagaataaaatagactgtaaagtcaccagtagcataaagatcattggaagactcttaaaacccactgtggcagtttggaggggaaaaaatatgcttaaattttggttctgtcacttttacccctaaatctgtttcacttatccttggtatttgagctttcttaaaacacaaaacaaaccaaaaaactcttagattctactccattagtaatcgtggcggagatggggaagctactgtgttccaggccctggggcttttttaaaaagccactttattgaattatgattaacatgtannacgttgtacttattttatgtatacgatttagtgagtttggggttaagtg

SEQ ID NO: 10193 - DNA, 528 bp, Canis familiaris
  misc_feature (1)..(528): n = a or c or g or t
cagggcccccagccctgggnacacagggtgtgggcatcggcgaggccgcnnnnntgctccggcctctcccctgaccttcctacgggatgctcttcccctgggccctcccctgcctcttggggagagaaggaggttggggaggaatttaagctgtgaagccaaagggcattcattccccctctcatttctctccccgcagccccccggggctcccctcaccgtccctctggccacattttctcctgcgtccttaagcctctggcccagggctggggacccataggggaggggaggcagcccagcacctgctatgcccctcccgacaggaacaggtctccccctacatcccctcgtccagcctctggagccactgcacctgcctctgagcccaaaacgatagtcctcaggtaaccacggaaaccaggtgtaggcagctgggccctgcagctgacccttagccccttggccaccaacagccacccccagttgaccccggcaactccttggggtccctttctgatggggcca

SEQ ID NO: 10194 - DNA, 534 bp, Canis familiaris
  misc_feature (1)..(534): n = a or c or g or t
gannannngaatctgttgtagcnnagtgccagaaagtgtggtgtttaanactnnaaaaacaaccccaccaacaaaaaaaaacagagcttggacaataggactttcaatgaccttcattatataaaatatgtacataacaatggatgactgactaactatcaaatagatggatttgtatcaataccaaatagcttctttttcgttttgctgaaggctaaattcacagtgctatgcaattcttgtcgttatctcagttttaaatgtaccttcagaataagcttcccccaccccagtttttgttgcttgaaaataccgtgtctctgattcttttggttgttgttattcgtttgtgattctttccctttttttttttaaatgtacaggatgccagtaaaaaaaaaaatggcttcagaattaaaactatgaaatattttacagtttttcttgtacaaagtacttggcgattagcccaaggttaaaaagttcataacagattttttttttttggactaaatgttttgttgggcagtgcct

SEQ ID NO: 10195 - DNA, 675 bp, Canis familiaris
  misc_feature (1)..(675): n = a or c or g or t
gatacagatgtgatattgggatctcacaaagatcctttataacaagtgttcatgagcacatgttccaaatctcctgggaattccctatattcctcgatgtggggccctgcagtgacccaagccaggnctttcccatggcacctttcctctgtcatgacgctgtgtctcatttcatcctgggcaccatatgagagaagcaggtgctggtatggtgaatcctatgtctcccaggctgtgcaggacagggacagccaccagccacagcctctctacccttctctggagatcagctggagatccagctgggatcttcacacaggccatgaggaggcacgagagttagattctcactgccggggtggcagggcgctggcctcatgatgagtgtacatgactgtggaaagtcccagtcccgggacgtggatggtgctacggagcctggcactgccggcagtgctgcttctccgatggctcggtttctctctgcagggccttcgacagcatggtgacatccatgatgatccaggtgtgctgagcatgagctgtgctgccggtgctggaggagaagtgctgttgacataaccgtattgttgatacagatatttattatcacttgcctattctcaagtgtcacagacgtgctgctgggggcaaagcctcaggcacnnnncatgc

SEQ ID NO: 10196 - DNA, 646 bp, Canis familiaris
  misc_feature (1)..(646): n = a or c or g or t
atacanccagacctnntcntgctcntagannaataaaatacanncnnttactcctggtttcagagnctcaaagcatgatttggtgggggtgggctttttccattccacaaggaagtgatgaaaactatttctgcgggctgtcttagttggtgtgtgttctgaactagtggttctcagacttccgcatgttcagaattgcctagagggcttgtttgaggggcacccgaccccacccccagagtttctggttctgtgggcctgggtgggccttgagaatttcaggaagttcccagctgatgctgatgctgccaggctggggactccacttcgacaaatcacttctgtgcacccccactgtccagtacatggtcacttggccacagaggttttggaacataggaaatgcagtcagcccaactgtgggattgaatttttagttatatttaacttaagggctattaacttgattcactttttagaaaattcttcagtatgttaggaactttggtatatgagtctattttttcaactataaattttaaatacaggtcagccctttctcatggaaatttaatacctgttttgagaatctaagacactgagctttgaagataataccagaatactaaagtatgtcattgttaaa

SEQ ID NO: 10197 - DNA, 537 bp, Canis familiaris
  misc_feature (1)..(537): n = a or c or g or t
acgcatgaaaaataaagcccaggcccagtggggctcaacnnnntcnnnngcanngagatctaactgggctggttcagatacagccnntgcgaggggctgggggcagtcgctcggctnnngggccagggggctgcgggagtagggacacctctttgcggggacttctcccagcctgctcacggggcaggggccagggctgaccccacactgctggtcacacacccacaccctgggctgaaagccagcttcctgctccagagctactgccttgtggttagaagcnnnccaccnnnnnnntccagaggctcnnnnnnntctctggcctttccatgcccnnggggaccccaaaccagccnaggccctggcagccccaccccatctccccgnngcccctccttcccttcccccatggatcccatgtcaaaagtctattttgaaaactgtaaatgttccntnnngtagatngcagagctaatttatcatgtttatttcccggtgaccnnnnnncctttttatatnctatatcaagaggagttt

SEQ ID NO: 10198 - DNA, 389 bp, Canis familiaris
  misc_feature (1)..(389): n = a or c or g or t
gggctcttttgttagtatntacaagggnnntagttgcttnnnacnntgggtcagaaacnnggatgatgaactgcatgctattatagnngggtttttggcaggagtatcaatgatgttttataaaagtacaacaatttccatgtatttagcttccaaattggtggagacaatgtatttcaaaggcattgaagcaggaaaggttccctattttccccatgcagatactatcatctattccatctctacagcaatttgcttccaggcagctgtcatggaagttcagaccttgcggccgtcttactggaagttccttttaaggctcaccaagggcaaatttgctgtcatgaaccgaaaagtccttgatgtttttggtactggtgcatctaaac

SEQ ID NO: 10199 - DNA, 226 bp, Canis familiaris
  misc_feature (1)..(226): n = a or c or g or t
gaattccacnnnctgcttctgccacannngctggaggccctccagcccccatcccccaacccgccccccacaccctgtcacttcagcctccccactgctcctaggagataccagcattgccaggactcttcttccctgtctctcctcttcttcctctgcccaggtgtctcaggtgggaggtgtgtgtgtggggaatagttaactccctaaggctcttttgtaaagt

SEQ ID NO: 10200 - DNA, 592 bp, Canis familiaris
  misc_feature (1)..(592): n = a or c or g or t
gggnnngacatcagcngctctctgtatgatgatgatnnngcccagtnnnnnatcgggagnnngcggaccatcntnnacatggtggagcgtgagtgtggnaccatcattgagggcgtcaacaccccctatctgtacttcggcatgtggaagaccaccttcgcctggcacacggaggacatggacctgtacagcatcaactacctgcacttcggggagcccaagtcctggtacgccatcccgccggagcacggcaagcgcctggagcggctggccatcgggttcttccccgggagctcccagggctgtgatgccttcctgcggcacaagatgaccctcatctcgcccatcatcctcaagaagtatgggatcccgttcagccggccggcccctggctgtccacaggccatcagcggttccccagggcctgcgggccgaaggccgaggctgggccaacagggagcagcgtcccactccagatgaatgccccatcagggtccgcgtgggtcccctcatctgaattcccggcagccctgggggggagtgactctcgcactcnncttataaatctttgtaatggtatttacttctagaa

SEQ ID NO: 10201 - DNA, 553 bp, Canis familiaris
  misc_feature (1)..(553): n = a or c or g or t
tctttcctgctcagctaaaaaaaggtaaagaagaatcttcagtgctctgaaataccttctgnnaagaccaggcatggaattccagagcagttcacccaagaactgaaggacgggagagaacagatttatttcctacgaaaatagggagacgtgtgcctgtccctggacccagcaggcaaggtaactggaaccaagggnnaggcctcttgctgctcagccccccaccccgccaggagttcaagcaaaatcagtggggccaggggccacatgggtacacagcctgaggtggggcacatcccccaacaggacttggcctggagcctcctcaccactggcagtgagtaggctgggagaggtggaaggagactgcctgcttccggctgggccactcttgctacctaactgctcacagctcaagctctggctaccccactgaggggcacacacaggttatggagttggggtccttcagttcaaccagactctgtggccttgggcaagcggtctgcctcctctgagcctgttttctctcgggaatcaaagctaaggcgac

SEQ ID NO: 10202 - DNA, 523 bp, Canis familiaris
  misc_feature (1)..(523): n = a or c or g or t
attttaaaaagatcagtagagtagaaaatcttccaagagcagagggagttcttcnttagcaatgaaaaaaaaatacataaataattaattactttaaaaacctaaccatgaggggcttagaagatttttgataaaagacaaatgttgctgtcattttctttgtcaattagaaagccgtggtagtttctatgttgcatctacatttcagactaaatgattattgtacacagttatggttgttcgctaatattttgtctctctctctctttctctctgtccaatgcttcttctgtatttttgtgtgtagctacaaaaagtgtaatgcattaggcattattctggtttgtttatgagtatctcctgtactgcattaaggtttctttcactttttttaagcttcgctactgttctcactttatgccgtgcaatatcatctgctgtgtttgctaagcaaaaaagaaaaaaagaaaaaaaagcaagtgatgatgccatcatgcttttcagtgttaaaatgtttcagcat

SEQ ID NO: 10203 - DNA, 539 bp, Canis familiaris
  misc_feature (1)..(539): n = a or c or g or t
tnnatgctggggacctggctgtcagacccgccnnnnnnnnnnannttcccgacactgcagcccttccagtacctnnannaggtgtgcatctcccacgtgggccagcctgtgctgaacttctcgttcaacgccttccatccggacacacgcaaacccatgcacagggagtgtggcttcatccgcctcaagcccgataccaacaaggtggcctttgtcagcgcccagaacacaggcatcgtggaggtggaagagggcgaggtgaacgggcaggagctgtgcatcacgtcccactccatcgccaggatctcattcgccaaggagccccacgtggagcagatcacccgaaaattcaggctgaattccgaaggcaaacttgaacagaccgtctccatggcgaccaccacccagcccatgactcagcatctccacatcacctacaagagggtgaccccgtgaccccgagtgtgtcgtgacccttcggctttgtagacgcccgccncaggtgcgggcgggccgcgggctcgtgggtcccagagtcg

SEQ ID NO: 10204 - DNA, 474 bp, Canis familiaris
  misc_feature (1)..(474): n = a or c or g or t
antagattctattgtgggatggnnnctgggtctgttgatggtgcttatgtgcctagcatcatgttactgagcagagcannnaggctgaggctcaggtatgtgtacttgatgtatgtgtaggcagtnnnagcctggaatggcactgctgttggcatgatctcttcattgtgaaatcgtgccactttgtttacacataagaaccatagtgattacatgaggtttttagaattgggaagcataaaaatgagtgtgtctaaggagtgctctgtacacaattaaaaagaaaagttattaaggtatctgattgcatgcatgaaaatgcagattattttggagttttaaaagggactattaatgaaatgtttgttttccttcttccctcctttctccctaccctgccactgattcagtgagctggagattggacaacagaaggagtaaagattctgcagtggcttnatctgtggtgattgt

SEQ ID NO: 10205 - DNA, 594 bp, Canis familiaris
  misc_feature (1)..(594): n = a or c or g or t
annnaccacctataccatcatccatttcttggtgagctttgtgattccatccatcctcatcatcttattttaccagaaggttgtgaagtatatttggagaataggcactgatggccgaacagtgaggaggacgatgaacattgtcccaaggacaaaagtgaaaactatcaagatgttcctcattttgaatctgttgtttttgctctcttggctgcctttccatgtagctcagctgtggcacccccacgaacgagactccaagaaaagttcccttgttttcacggctatcacatggatatcctttagttcttcagcctctaaacctacactgtattccatctataatgccaactttaggagaggaatgaaagagactttttgcatgtcctcaatgaagtgttaccgaagcaatgcctatactatcacaaccagttcaaggatggccaaaaaaaaactacgttggcatttcagaaattcctcccacggccaaaactataaccaaagactcgatctatgattcatttgacagagaagccaaggaaaaaaagctcgcttggcccattaattcaaatccaccaaatacttttgtgtaat

SEQ ID NO: 10206 - DNA, 474 bp, Canis familiaris
aatcgtccttgaaaatggtcacaccaactctgcctacaccttccagagccagcgattccttatttgttaagtcaggctgtcccatggttgggcgcgtctctgttagaaggttctttctccggttgctgaaatctacagagtgctcccttggctctcctttaattttgctcccatttctggcttctgtcctgctgagctgctcagagtatttctacccctcatttctcatggcatctttgaggatgaccaaggccagttactcgtcttctcccaggtgctgtgatttcagttcttcattccctcaactacccttcatttgtcatgggtttcagatccacttcaacctgagtgaatgttagcagacagaatccttgaaggtgaggagctgtctttatcatcatacgtgtagaaaaatatctgaacatttaagtggttttctctaaaaatatattcaagatatatgtttattctatt

SEQ ID NO: 10207 - DNA, 49 bp, Canis familiaris
  misc_feature (1)..(49): n = a or c or g or t
gatgagcagatttgccagcaacggaggtcaagacctggagtttnacaga

SEQ ID NO: 10208 - DNA, 409 bp, Canis familiaris
agttcactgatctagatggttccaaaagatttggcatcaacacttggcatgacgagagtgggatttatgctaatttatatgtaaaacaaaaactctacccgttaactggtggtcctgtggtccccttttaaaaataatctacggaatcagattctctagctaatgaaagaataatggatataactgttgattttctatgctaataaatgcaatgggaatgttactatcataggttcctttagaaacaaaatcttacatattctaggccagcatatatatgtccttcttttcataggctgctctggtattttccaaagtttactatgtatactacctagggtgtacaacagaatttgaggtggaacttggtggaattttcttttatttatagaatatgtatttatttcaa

SEQ ID NO: 10209 - DNA, 621 bp, Canis familiaris
  misc_feature (1)..(621): n = a or c or g or t
agggcagaaggcacnngtctcccctgnaggcangcggcnntcctgcccgaggcccnnnnntctgcatctttgttttcctttgggtggaacacagtgtctgccattcagttagaccttcttgatcgcctctctgtgtatccatttttccaaagaagagacatagtgaagtacttggaagtctctacttgaagactgtctgaaggtgtttgctcgttaacgttttggttttcccccatatcccaaggtgaagcactgagattcttccatttaagaacctaagacctgaaaccctcactggtcagctacggtgtgtttaggaggccccagaccttcacagtgtctttgaagcccgaccccttggtttccttttggattttccttccttttgtttgaagtttggttttgcttttctgtgttttgtacgtatcttgttgaatgttgtcaagattgagcttcacatttcactgcagcagcagagcagagtgtacattctgatttgctacgtttatatatatcttgaagctaaatgtatatatgagtagtttgccatgagataacacagtgtaaacagagtagacacccagaaatcgtgacttctgtgttctctccatttgagtattt

SEQ ID NO: 10210 - DNA, 572 bp, Canis familiaris
  misc_feature (1)..(572): n = a or c or g or t
accngnaaacacacagtggtagttctgcttctgcccctgaaccatgtgtgggtccgtgaggaggtngacgctgggcaggcaggccgctgcgtcccaggtcttccagggcagcagaggcacctctatctgcgtgaggcacaaaaagcaggaaaactcgggcggaggtaccagcccgatctgcctcactagctcaggttgtacgctttgtcacggctactagccgatcccaggaaccttctcttgagcactgcaaagatggagcgtaaagagaggtgaggaaggtcatggcaggtagggtgggatggagggtcgaatctgctggtccagaaccatggtacaggtggtcaggggtcacccggtaccagtgtcttggaaacacagctttgagacatcaaagaataagatgtccgaagccgttgatgtcctggcagaaggtggcaggaagagagaggaatgaacggtatttattaacagcggaagcctctgcccttcttcaagaacacctcctccctcgccatctggatggggccactggcacgtgtcctggtgggcctggaattccccgagtagat

SEQ ID NO: 10211 - DNA, 133 bp, Canis familiaris
catttcagtttcagccagagaacatcattcagatgttccagctccagaaccagcctgcccgagcttttggtgctgtcaaggtgaagatatcgagcaactgggggaacccacgctttacctgcctgtaccgagt

SEQ ID NO: 10212 - DNA, 668 bp, Canis familiaris
  misc_feature (1)..(668): n = a or c or g or t
ataagtttaatgatgagaagaagttgatgaactttcatcagnnncntcaagatatcacagaagatcaactcagtnnnnnntcaatccactatatgcgatctcattaccaagaagctattgatatttataagcgaatactgctagataacagggaataccttgccctcaatgtttatgtggccctatgttactacaagttggattactatgatgtgtctcaagaagttctggcagtttaccttcagcaaattcctgatagcaccatcgcactcaatcttaaggcctgtaatcattttcgcctttacaacggcaaagcagctgaggcagaactcaaaagcttgatggacaacgcttcttcttcctttgaatttgctaaagaactcatcaggcacaatctggtgaatagcagtttcctgttttgactgaactgagcttatcctacttcagtaatatcacagcagttagatggatgaatgaagggagatattgtagcagatacttctctactccaagtggactcctcctttctatgggggagagaaaattaagtttcagatatcagatcctttcctcaaggaaacccttactgggagggcagtaatacatatataacattgagaaagaagtgcaaggtagtgtaggtccaagtgttcattttgttggcaaag

SEQ ID NO: 10213 - DNA, 537 bp, Canis familiaris
  misc_feature (1)..(537): n = a or c or g or t
gggtaagtaaggaggnctctgtaccatggcnnntacaaagcagactgcccgcaaatcnnncggtggtaaagcancgannaagcaactggctacaaaagccgctcgcaagagtgcgcnntctactggaggggtgaagaaacctcatcgttacaggcctggtactgtggcactccgtgaaattagacgttatcagaagtccactgaacttctgatccgcaaacttcctttccagcgtctggtgcgagaaattgctcaggacttcaaaacagatctgcgcttccagagtgcagctattggtgctttgcagatgtccgtggacagaccctacagctggtggttttgtgaatgctggtaggagataagaggatgccttcaaagaatcttgaaatgtaatggaaaaaactaaagggaccaatattaatactagaaggaggcaagtgaggcctatctggtgggcctctttgaagacacaacctgtgtgctatccatgccaaacgtgnnnnaattatgccaaaagnnntccagctagcacgccgc

SEQ ID NO: 10214 - DNA, 617 bp, Canis familiaris
aatgtaaacacaatggtgtagttaattaaattctgggtggatgggagcgggactgattactgtgtcttgcccttcaccctttgtttttttcagaaccaaataacagaaatgtgtatgtgtgtactgtatctgcctttccaccacatttttatgacactgtattccactgcctgctttttttttttttactttctttccctaggatttgtccaataattagcatttgtgattaacagtgatattagggctgaccgcacataagaagtcacaagagaagagtggaagggcaagaattcagagcatttgttcatacaatgtggcaacctcttttgcatagtggcgtaggatcctgtttgtaatgctatcataaatattctgtagttttgtttccccattcccccaactggagctatgaaactttttattggattcagtcttgtcttttgtctagagagaattttatcttgttgacgcatgagctgtttaaaaattattctattaaatgttggttaatagttgtgcagtttttcttttcagaagaaaaggcaattcaaatgttgcctttgttttctgtcaccttccaacccctcagcacttctagtcagatacagattcat

SEQ ID NO: 10215 - DNA, 719 bp, Canis familiaris
  misc_feature (1)..(719): n = a or c or g or t
acagtgntngnaattcgatctacacgnnnnnngctatggattttaaatgtagaaaaatgagagannnnnntctgatcattaagtnnnncatccgcactttcaagatcgttannttcaacaggaagttacgtcgtcaaattcagtatggacatctatgtagtgctgtaggtccctacttgaacagtctcctaataattgcaagtgttgctgctgtgtcagtattacaaagtcactttctttgttaccccgaaggccccctcctagaagtcatgtaatttgtcattcacatcacacaacttctagttaaagaacctgtgcaaagacctgagacttggctacataccagtgtctgattccttcagttgctgaagagccgttggcagacacgcacttgttctgagctctactgtctgcagccaggagtccctgggatctggaggtggttgccaagtgcatggatgcctctggaccactggagttctgggtttctgttctttcagaagcttctttggagctttttacatttgttttgaagtccaatttcagaaacaaggttcatggtggctgcaggcaagaatttgaacagctgatgtactgtttttcttcaagtgttagactgagttgatcatttcaacagaactgtgaacaaatcaacgtctagcatagggcaactcttggaagccaaatatagatcgtgacagggcagtagttgagtctgt

SEQ ID NO: 10216 - DNA, 548 bp, Canis familiaris
  misc_feature (1)..(548): n = a or c or g or t
ctgnntcctgcttgaagtcgatgtcacctgtttgttnnagtgcccccgattctgctacctgttaggtttccccagaatatgtattatccctgatttttccgcttcttgccggccacnnaagcattcttggaatgcatctcatcccgagtgaatccgctcggccctctctctgccaacgacaggaatccctctaggtcccgagagttggagacttggatgtgggagaagatgacagaagccgtcagttactgaccggagtggagacttggaggagtgtgattgattgaaaaggctcaacatgcttcaaatgaaggactctgcatccaggatgcaccagatctgggcaaataacagctccccagggagcctggctgcaccctggcctgggttgtctgcagaactgcctcaagattcaggaaaagctggggtggtttgttttttttaatgttttttgttgttgttttattttgctttgtttttgttttgtttttcagaaggtggcannnnnnntttctcagcctccacttttattccttggaaactccatc

SEQ ID NO: 10217 - DNA, 494 bp, Canis familiaris
  misc_feature (1)..(494): n = a or c or g or t
ctggtggtnncagtttcgaaataggcnntatttttccatgtgaatgactacaccttcttgancnnngagttgcttcaggcaactaagatttgttctttaatgaacataaactgcacctgtgcaattttgcccttttttctctaccctgccttcttgcaaactgaaagtgtatcccctgttatcttttagaattattaagaaattaagaactgggactcgctgcagacataattatggcctagaaatgattggcagggtagtcactggggagcggggcttccggagctgatgtgcagattccaccactgagtgacacgctcacggttgtggtctctagggcccgacccccgcctctgtaagtagaggaatctgcaacctgacctaacagaatagttaaacattgagaaacaaggggcctctgggtggcccagtggttgagcgtctaccttcggcccagggcataaccccggggtcctgggatcaggctccctgca

SEQ ID NO: 10218 - DNA, 174 bp, Canis familiaris
ttaaacctgtgaatgctacttactttttttgttgttatgcaagcacttattgtaaagtttaggaacccctgtgtagttaccactaagtaattatggactaaatatgaaccttttgtttcttgtttattgagtttgtaggtaaaatgtatttttctacattatggcttattgctt

SEQ ID NO: 10219 - DNA, 467 bp, Canis familiaris
  misc_feature (1)..(467): n = a or c or g or t
aaaacataaacagtctttcannctggagtattacctgtgtttaaagagtggnnnaaattaggctgtgaaaacaaaaagcctcatttgtagataagtaacaagtacattatataagaagagtaataaactatcttattgttgggcatgtggtaacataattttgctaagtaaaaattggggaatatagcaaataatttaaaaatttggnnntttcagcggattagtacagtgctgatnnnnnnnnnnagtggtctgttgttcagttctcaatttgcactgctaattaagtctactcgaatcagtgatgacatttattagaannnnnnagtcctnnntacaaaacacttgaagaggttttgacaagatgtagttgttttcaagagtgcaaggagtaagggaaacagaacctggttgaatttgtctcctactgagattgttttaaatgccaggtactcttagaataaatg

SEQ ID NO: 10220 - DNA, 409 bp, Canis familiaris
  misc_feature (1)..(409): n = a or c or g or t
gcaatgcancttccccanctcagctgcaccccagctccnnngctgcagnggcacaagcaccccactccctannnnagttagtgcctgannctcaggggacctcgttgatgggtgccccggcccttnntccagtacagcgctgtctgcctggctgcttccctgaaccctaannnnnnngnnnnnnnntnnncgttatttattattgccctntgtgggttnnggagggnacctcnnnggnnnnnnnnnaannccccttcnnnaanannnnnnggtcttgacttgaagannattgacccnnnnnngcctccnnngnntcnnnnnnnnnnnnnnnnnnnnnnggtgnnngncnnnnnnncacatcagaatatngatggcaaannatannnnnnnnnnnnncctnnnnnggggg

SEQ ID NO: 10221 - DNA, 580 bp, Canis familiaris
  misc_feature (1)..(580): n = a or c or g or t
aggaaaaatgtcagtnggcaaatgcattttttttttttaagttagagggttaggtgaatgggagtgagaatcattctgatattgtctataaacaaagctttaatgatgatgcgttggaagtattaaagtgtgattctacttttgcagaaaaaatctaaagatcagtttatatagctttattttttatcttatcgaagtatacagaattttaatatgcatatattgtctctgacttaaaattatgatgtgcattgccatttaaaatgtccattcattatgtaatgcaataaaagaatcttcaaaatgtatttaacatgaatggtatctatagttgtcatcatcataaatactggaatttatttttaattatgaaatatagtaggtgcagttaagataataaatcagtctccaggtagtaatgtttgattgataataattcattaacccactttaaaaaattaaattgtgattaaaccaaatcttacatttctgtaaagtttattttgtatgctactggttttaacttttatttctgtagataatatcgatgataattatatcagacttttctgcagattat

SEQ ID NO: 10222 - DNA, 644 bp, Canis familiaris
  misc_feature (1)..(644): n = a or c or g or t
gagagcgtgancagcgatncngntattcccgttgacacccctctcactgggaactcggnngtctcttctccttgtccacatgagctagacctcccggttcctgaggggaaaccctctgaaaagcagaggcctgaggaacctgaggaacctgagggaccagacgtttgtacaaagaaattggaagttgaacattctctgagcccagattctgagcctccgttgctttgtcaggaggaggaggaagagtctgttcagatcgactctaaagatgctcttgataatggcaatggcgtgtcgaactgcgatgttagtaatggaggcagtcagaagctccttcatgtggacaccagcccttcaacagccacgaagattcacagccctgtacctgacatgagcaagttcgcgactggaataacgccatttgaatttgagaatatggccgaatctactggaatgtacctcaggataagaaacttgttaaagaactctccccgaaaccagcagaaaaacaaaaaggcctccgaataactgcttgacatagcaggaagagctatttaattatctataactttgtgttttgttaattagtaacaactggagataaattgttttcagatttttctctcnnnnnntaaaaacctatc

SEQ ID NO: 10223 - DNA, 552 bp, Canis familiaris
catgccatggcccaacttgatgcccctttgatcttaaaactatgtcttggtaacgaagaaaactttgggcaagaacatctgtaacttcaagattaattaattacaatatttgttctgaagaacatcatctgttgaagaacaacagcatcttagttgctgaatagctttaggtttggagatagaagagactcacgtcatggtctgctcttcccagtgacaacagctaaggtccttcctgattttggtggagttttaggggatatctggagctttgggttcttagtagggaattgagactcagaggtgacatcttttgtgcatggagacctctgtctagattctgggctgacttaaattaaaacttagagtagtgaggtgcctgggtggctcaatctgttgagtgtctgacccttggtttcggcttaggtcattatctcctgggtcatgggattgagccctgcctcaggctccgtgctcaacagggagtctgcttgaagattctttctccctctgcccctccccccactcatatgcatgcacatgtgctctctc

SEQ ID NO: 10224 - DNA, 456 bp, Canis familiaris
  misc_feature (1)..(456): n = a or c or g or t
gatccnctcngtaatccaacagatcacagctaccgtgacatttctgccgctgttggaagtctctttaattgatgacaggtatcgtgaatgctactgtgaaagcccattgccttgagaattgttgaagctatctaattgaggtccacccacatgtgtccttttcctgaataagaaaagtagtnctgcagaaatgaaaatgatgttgaattaaggtggaggaatggaaacatgttccgactgggcctatcagggtctgaaatagagccccagaagggattgaaccacacgtctccaggattcttctcccagtgtcatcaattggagagaggagtcaagcctccatgggaattcacacagagaaactaagcaacagcggaaggtgccctgctccagctgcagggactcagccagaaagactggaatactacatgactctacctgcaagttggggaagga

SEQ ID NO: 10225 - DNA, 446 bp, Canis familiaris
  misc_feature (1)..(446): n = a or c or g or t
tgacattcagaaactgaaggagaagagggatctgctggacaaggagatcacccaattaatatctgaaggctacagtgtggatgaactggaggaccacatctcccagctccatgaatataacgacatcaaggatataggccagatgctgctaggcaaactagccatgatccgaggtgtcaccaccaaagagttgtatccagaatttggcctggaaatgaacgactgaaccaaggctcacagtcctttgtccacagcctgatgggacaggtggatttgaacatgagaggcagtgagagcccagccagcacacccacaggcttcccagtgagaaagtttcagaagccgttttctagagaactcaatctgagtcaggagggagcctggagaagaggcagatggtgtggaagcactattacctgctccacnnnnnntgaaatgttctggtg

SEQ ID NO: 10226 - DNA, 502 bp, Canis familiaris
  misc_feature (1)..(502): n = a or c or g or t
atggaatacanncgctctcntnaccagtttcagatcacagtgcagcattacttacacgagctggtcatcaagacgctggtccagcacaacctcttttatatgctgcatcagttcctgcagtaccacgtcctcagcgactccaagcctttggcttgtttgctcttatccctagaaagtttctaccctcccgcccaccagctatctctggatatgctgaagcgcctctcgacagccaatgacgagatcgtcgaagtgctgctttccaaacaccaagtgttagccgccttacggttcatccggggcattggcggccacgacaacatttctgcacgaaaatttttagatgccgcgaagcagactgaagacaacatgcttttctatactatatttcggttttttgaacagcgaaaccagcgtttgcgagggaaccctaactttacgccaggagaacattgtgaagaacatgttgcctttttcaaacaggtttttggagaccaagctc

SEQ ID NO: 10227 - DNA, 624 bp, Canis familiaris
  misc_feature (1)..(624): n = a or c or g or t
gctcacctactgacagacaaaccaacaagcagtcncagcacngagcacttccagctgaatttcactgtcaccaanntactctattccgaggacntagcccagccaggcaccaccacacatcagcgaaacaagcgaagtattgagaatgcgctcaaccaggtcttccgaaacagcagcatcaagagctatttctctagctgtcaagttttagcattcaggtctctcccccacagcaaccacactggggtggactctgtgtgtaacttttcaccattggctcggagactagacagagttgctatctacttggagttcctgaggctgaccaaaaatggtacccaactgcagaactttactctggacagaaacagtgtccttgtggatggatattctcccaacaaaaacgatgtcttggctgagaattctgatctccccttctgggccatcatccttatctgcttggcgggactgctggtactcatcacatgcctgatctgctgcttcctggtcactgtctgccggcggaagaaggagggagaatacgaggtgcagcaggacagcctaggctattacctgccacacctagacctgaggaagctacagtgagagctctgcctgaggctc

SEQ ID NO: 10228 - DNA, 669 bp, Canis familiaris
  misc_feature (1)..(669): n = a or c or g or t
tgactcagattctgagggacctgagagggacgcccganncagctcccggggccatacacctcttgacctcactcgtagcaccaaggtgaagaccttgctgctaaatgctgctcaggacaccatggcacctcccctgaccccacccagccctgcagggccagatctgccacttgaggatgcagtcctacagaatctagagcatctgctagatgggccaggagcccagggcagctgggcagagctagcagaacggctggggctgcgcagtctggtggacacataccggaagactgcctcacccagcggcagcctcctgcgcagttacaagctggctggtggggacttggcaggcctgctgtgcgccctgtctgacatgggcctggaggaaggagtgaggctgctgaggggccctgaggcccgagacaagctgcccagcacagaggtgaaggaggacagtgcatacgggagccagtcggtggaacaggaggcagagaagctgggctcaccccctgagccaccaggagggctctgccatgggcacccccagcctcaggtgcactgaactgctgcccaccaaccagccccctccctgggcccctctgtacagcacccctgcctattccagttcttatttaacaccccatgcccacccctcagttggggcaaata

SEQ ID NO: 10229 - DNA, 622 bp, Canis familiaris
ggttgcagttccataggttcagaggacccctgatcccatttttgctggttccaatggctctttcagagggtggggaaatacctaggacaggttcactctggttgtggacgtggggataaagacattacttagcagggtgtatgttagaatatccagttcttatacagccaagccctcagtttgtcttccttattttcaagttgacaacaggtcttcatcgggccaacaccaagataccctcgtgcagctcactacctgagcctcaaggtttatcttccaaaaatcaacagcaaagggtgacgttagtagttagggcacaggactggaaagtggactccactggggttgaagcaggtcacgggtatagcagatgacaatcacagaggtaactggaagacactggaagacaagccatctacatgctagacatagaacatggctacctggtagggaggaatggggctggaaatcagacaggatcagaatgtagaaagcacacagaatgtgtgcaagggccagggacagagttcctggttattgatacatgcaaggggattggatgggaaggtgaacaaaggctgaaaaaaaaagtggcctttcacttctaaaggccttatttcta

SEQ ID NO: 10230 - DNA, 698 bp, Canis familiaris
  misc_feature (1)..(698): n = a or c or g or t
aaagtccnngatngaatgactgtggtccactccatagaacttcaggcaaccgatgggcacgaccgtccgctcactgactgctccatcgtcaacagtggcaagatagacgtgaagactccttttgtggttgaggtcgctgactggtgataaaacaggcagaaaacaaggaagacactctggcagggatttgtgtgtgtgtgtgtgtatgtgtgcatgcatgtgtgtgcgtgcacacgagcttgcacccatgtgtgtcttttgattctccaaagttactgttttgctttgttttttcacttctgtgtctcaccctagatcacaggaaagttccaaacatcaaccactcagtgtttagtttacataaattgtggtaaatcacttgtttaaggacttggcacttacaagacctatcctcttcctccaatggtgctatttttaaattagaaaactttgtatcttctgtttccttttgaacacaatcattcattattttgctgaattaattgtgatccccacagtgaacgacactgaagatttgtctgaagaagatgcggtgtgaagtttgtttttttgtattcaaacagaaattctttgcagttaaagagagatttgatgagtataatctgatatatgtcatagggacttttacctgataaaaggtgctctngnntnctctatattaaatgcttttnnnnnnn

SEQ ID NO: 10231 - DNA, 205 bp, Canis familiaris
cggctctgtccatggggaccccactaaggggcaggtcacacggggacccgcagactggcagggactttgtagggtctgcattgtgcacggtctggggcttcctttgaaaaatccacccccaacccatcctttaacagtcgttactccccagtaaacctctcatgtcctcacccccctcagaccccacagatggtagcagggtcca

SEQ ID NO: 10232 - DNA, 469 bp, Canis familiaris
  misc_feature (1)..(469): n = a or c or g or t
ctatacaaggcacctaattacttaacttttcttcttggcctggtcanagnnntgtgtnnntttcagcctcccacacctgccctgcctcccaggggtgcctgtctccctgtgctcatggttattcnantgcccacacacgcccttgtgccacctggcccatgctcacaggctgctaaatggctgtcccccagtgtgagattttgccctctaaggagcacgagagggttcccatctgctctgttctgggagctgtcagcagatacgcagacaggccccctttaaggaaatggttccatagatatgattaatcttttccgaaagactgcacattctttcctatttcagtgaatcatgttttaagaaggaaatctgttcatgtagttcaaaatttaagataacagaaggctgttcagccagattcccactctgnnnnnntaaaccacagagccccctacctctagtagcaaca

SEQ ID NO: 10233 - DNA, 342 bp, Canis familiaris
  misc_feature (1)..(342): n = a or c or g or t
agccccctgnnnaagnanctcnnnggnnngctggtagtgcatgagctcttctccagtgtcctccaagagannngcgatgaggtnnnnntgcnnnngccnnnnnnnngccagccgctgctgnnnggcatnnnnnnnaatnnnnncannnccggccgtgccannnnnnantnnnatgtccagtgcagnntgacttctgagcaggtaaagaannnnnanncnngtgngnnagntgaggccnnnnagtnnnnnngnnncatctttgtggagatacagagannnnnnngnnnncagnnnnncnnnnnnngnnnngagnnnngcccnnnnnncnnnnnnnnnnnnntc

SEQ ID NO: 10234 - DNA, 57 bp, Canis familiaris
tttggtagtgactgtctctgctgggtcaaagtatatgtgacgttttttctttttttt

SEQ ID NO: 10235 - DNA, 625 bp, Canis familiaris
  misc_feature (1)..(625): n = a or c or g or t
aaattttttgtagtaactaattgtagtgcttttaagtagtnnaaaaatcattctcaaataagttctgcccacatcntagttccttggggcaattctaaagttcagtaatccagtgtgaatttgaaatattctttcatcccttcagtgtctttttatatatatcagtacccaaacgaagtataccaaaagcctaatttctgtgttgcattaatgaagtacttgttatttgtctaattcagtggattaggtgaaatagaggataagtcttttcaaatgtgcatctggtcataatttttctaaatgttcattctgttcatttttggtgcatgatgccaaatttgtctttaatcagccattactacctgatatgtaatgacagatgttttcctatctgaccaatgggttaactatttttctctgcagattctcactacattttcaaatatgtatttggaaaaagctgcaaaatgctcctataagtaagttagcatctttggccttatctatgcataatgttccttcggtttggttttgacaaactcgtggacttgcagttgctttgtagtattttaacttattgtgatgtaatgaattttttgaaatgtttacttgattagctattaaa

SEQ ID NO: 10236 - DNA, 521 bp, Canis familiaris
  misc_feature (1)..(521): n = a or c or g or t
tcaagnngcggnctacttnnctgccctgctnctagacacagctgcccacttcagccaccggactgggcctggccagggctgtgggctcattgtggccctccagatccaggaagaggaagagagtggggatggcctgcagctgtcgctgctccagcggtacttccctgcccagtgctggctgcaggtggatgcaccaggcccaggacagcgcggcctccgagcctgcctggattcaggtgggctgagccctagagcagagtggtgggtggctttccgaccagatggagagatgacaatcaccccatggcctacccagtctggtaaccccaactcagacaaaggttcaagttctggaggccagccttgagctttgatgtgtgacaccctctttgtgcctcaactgcccatggctggaatacttacttcagggacttgtacagattcaaagacctaaagaacagtgctttttctcttgaaacagagcattaccatgtacctatcatgcccaatcaacatattgt

SEQ ID NO: 10237 - DNA, 519 bp, Canis familiaris
  misc_feature (1)..(519): n = a or c or g or t
agcgtcatgggcttctggaagttctcccctttcctggttctcggcatcctggcgctgtaccaggtgggcttcctnnaggcagcaccattcaggtctgctttggaaaatcctccagactctggtgtgcgcaatgaggaggaattgcgcctcctcctggcnncagtgatgaaggactatatgcagatgaagactcatgagctggagcaggagcaggagactgagggctccagggttgctgtccagaagagatcctgcaactctgccacctgtgtggcccattggctgggaggcttgctgagcagagccggaagtgtggcaaacaccaacttgctgcccaccagcatgggcttcaaggtctacaatcgacgccgcagggaacttaaggcttaagcagtgacatgaccccaggaagaaggtcaccatgaagtgaactctacttctcttaacttataatgaaaacaacttatagaatgcagagcatggaagacacatacatatgcatgcttactattaaaacat

SEQ ID NO: 10238 - DNA, 484 bp, Canis familiaris
  misc_feature (1)..(484): n = a or c or g or t
aacacnacannctctgccgtttgagngnacaannntgcctcccctcggggcnnnnnnctgcagccaccaagaatccaaggcttttgctgacctacgtgttcctgtggcccaactggctcnnngggtcgcgcttccgcaaggatgggctgggagctcagcctaggtcaggtcatgattaggagctgtcaagaggaagcatgagctagctgtttcctgagatgagagaggagaatttcttttctttttctnnnnnttttttctaaattaattaactattattattattattttttttttttttttactgtannnnnnnngaacagtctgtgctagagcagagggttnnnnnttgtgctgggagagagagaacatttccacgatgataaagcagcatcctttaaggatcccaccagtgggatccccgggtggctcagcggttgggcccccaccttcagcccagggcgagatcctgggttccgggatc

SEQ ID NO: 10239 - DNA, 541 bp, Canis familiaris
  misc_feature (1)..(541): n = a or c or g or t
ccatctattaaaagagcacccccgtcactcatccagggagatgcagctgnnacatttagggnngagaatcacgnngtctgtaacttattttgaaatggattcagcaactgtacacataacatgcacacaagcctacatggcaaaatattaacaactgctgaatctagatgattccaataatccagagagtagaagaaattatgccaaagattaaagtaaaacttgaagaattgccttaagtatctaattgtggttttacaaatcttccatcgtgatttgctagaagtttagactcaatcttttgcaaaatggtgaaatagggacagtctgtaacaactttgtctccttccttccttgtggttgctctttccctcccttgttggtgtcccttctggttacgtccgactgtgcatctccagaatcttctctgattccttcaccacaattactctgctctcttaaagatgcactaaatgactggcttgataatctgccctgcaaaggatttgaaaccctctannnnnctttcatgacacagatg

SEQ ID NO: 10240 - DNA, 512 bp, Canis familiaris
  misc_feature (1)..(512): n = a or c or g or t
ggcgctnnatagataacacctacatgggnnggcacagcagcacgtacctccccacccctcccctgctactgccaacaccaggatactcctcatgacccggggctgaggtagccccccacccgtcccctcaaggacacccatgggccgagggccctggtacctgcagcatcttcatccccaccagcttgaagcccctcctctcaaagcgctggatcacgtcccccacaagccgccgctgcaccccatccggcttcactgcaaccagggtccgctctcgagtccaggagggaagaggaggggccagagagaaggggaggggaggagtggggagggcagtgaggagggaggagggcagggtgaagaaccccgcattctgttgcggtcctgctgaggtgggtaggtcggtggccagctactgttggcaggagatctagcggatcttaacgggtttttgaaaaatcaaatatgctttttgatgctgctgcgagtggaattgttttctttaatttttt

SEQ ID NO: 10241 - DNA, 610 bp, Canis familiaris
  misc_feature (1)..(610): n = a or c or g or t
accagnngctagtnnannnaaacacactnnncttttnnnnntccnttnnnnaaaagttaacaacgtactgataacatgaaggctagttccatcctgaannaaataagtccagtattaatttatgtgtaaatcactggggttaaactcttctagccgtctagatcaattagagactcagaagcagtggaggtccctgcccggaggcggccctacgggaggagtagctccagggcatttgccgggcttagaaacagaggttagcaagggagacagggagaccctggtgaaggtgagggcaagggtggggcttagtggctctggtgggagctgagccctccgcgggcctctcttctcctttaaaaagtcttctgtggtcaactgactcctgcgtctggcggtgggatgagactgcacagttgatggtaggtgagtttaaagtcttaatctatgcattcagagaaatatttttatatgctttgtgtaatttataacaaggactttttttttagctttgttaactgtgaattcacccctcctccactgcatatttaaagcatgtgttcacactatgtgtaannattcattgaagactctattccttgtgcattgc

SEQ ID NO: 10242 - DNA, 205 bp, Canis familiaris
caggtaagagtcatggctggcccttctttgtagaagactccccagggctgtggtggtatccttgatgggcttgttaaacaccaaagaagacaaactggatggactgagattccgtggttggacctatgccctaggcttggggatttgaaggtttaagtttgctaaattgactgtttgcctctgttatttagcctcaggcagaaga

SEQ ID NO: 10243 - DNA, 589 bp, Canis familiaris
  misc_feature (1)..(589): n = a or c or g or t
cctnntatttnctaccttggaaccatgtcagcttcagggggannactttcagattnnnnaangagtctgntggatctcatacgaagggagtagttggcagatgcccctccattctgaacatgctctagttccctaaacatagagcattcctgttgcgtnctctcttccctgagtaagccatgtagccatctgcttgtcacacgcctctcatttggattcatttttgggccaactgttaagaattgcctgacattctgtacaaagcaccaggcgcatttatgcttttgactgttttcaatgtggagatggaggtggtggtgatctgtttggaagggatggagtttggaagggatgacaatcagagcctcctctagccaacagtatgtacttatcaaaaactgactagagcatcaagcattactgaagatcaaggtccttgctttgcgtcagaggtgacggagcccaactcctcagcctcatggaacatactgcttaaacccactgagcccacaggctgcgaagctgacctctgatgaagaagacatttgtcattttacatctctctctctctctctctctctctctctct

SEQ ID NO: 10244 - DNA, 602 bp, Canis familiaris
  misc_feature (1)..(602): n = a or c or g or t
atgnnnagcataaatactnnnnnagtannnnnnnagactatccactgaactagaaattagntctttnnaaaatagagatttagttgtgactttccaaagacccccaaaagaagtgttttaaaattagagttaaaatcatgtgaaaatgagatgaggaaagcctaatatgtgtatttattttgttgagaatggtgttcatgacttcacatggtatttgtctaccagtattctcaggagaaattctaatcggatcttagaattaaaagtaactgattcacttttatttcatggatattactaaccatgtaattgatatttaaaaaattatttgtagatcatgtttacttgttatactggtattattttatgtagcttaaaacctcttttgtattgttcttttttcacaaccttggtttttaacatttttatttccacttttatgatatgttgtctgtcatattttatatattctaattagtctcttgaaattattgggaaaagcagggtaaaattaatgaaataactcactagattttagagatataaattttccttcctttaagacttcttttgtatgaggaaatatttcagaggattctggt

SEQ ID NO: 10245 - DNA, 529 bp, Canis familiaris
  misc_feature (1)..(529): n = a or c or g or t
atgatgacttgaatggacagatctngagnntcagnntctatgaagcaaagaanctctnngccacccagaccaaagcncagtctctggctgcagaaatagacacagcctctcgcgatgagctcatnnaagccctaaaggaacaggaggagatcaacttccggctgaggcagtacatggacaagattatcctggccatcctggaccacaacccctccatccttgagatcaaacactgagataagggctggctgcggcacggcctcagggaccctcagacccccagacctgcctgaggatgcggccccagccgggcctcacacacacaccggaaatgtatctctggccaccctgtcctgtgtgccggtgtgtatgcgggaagccgtgcacacagcaagggctgaacgtggggccgtggccgtggaggacctctgtgcggtcgctatccgtgcattctgtggtccctgcgcaaggacagacagtactggtggtgggaaggacagggtctgctatcaggagctgctgtgatcac

SEQ ID NO: 10246 - DNA, 563 bp, Canis familiaris
  misc_feature (1)..(563): n = a or c or g or t
aggnataacccggaagaaaaggcccttgccgcagctgctccgcctaaatcttcccgccgcacgaggactcggtccagcaaggctgtctcatttcctgacctttctgaaccaaaaaatgagtttgtgttctcgactcctgtgtcaaaggttccaaggaaagagaaagggaaaaaaatagagactccagcccagctgcaagaattagtttcagatttatcttctcggtttgtcttctcacctcctgctttaaggaccaggcggaaaaccacatctaacacatccagagctggagatgaactggaagatgatgctccatcagtagaaagtgtgggaagaccaaaagtgaaagcaaccaggactgcaaagacgagacaggcaagcaaaatcaaagaagaagataactggtcacctcctcctgtgaaaatccggctgatttctcccttgccaagcccgattgacgaagtccagagcaagcctaaaagagcaacagcagcaccaggaagagctccaggaaggggcaagaagaagctgtcctcctttccaaagcaagttttacgcagaaa

SEQ ID NO: 10247 - DNA, 451 bp, Canis familiaris
  misc_feature (1)..(451): n = a or c or g or t
taattaatattcagannnctatattccgacacatagaatannnaagatcatttaaangatgcaaaatacatccccagggccagaggggaagaagagggaggggaagcgagggataagagaaggcggaggactgaatatgaatgcagacacttccgtgctggcctattgtctgcacggtttcagccttggaggagaggagacaagcctcccccaaccccttctgcagccccgcacgagccaggccactcacaatgctgtttgaaacaggggagcccgaggggcagcgtctgggaaccagagctgtctacaccgcgcgcctgcagaaagctgccctctgcactcctctcttttggaagctgtccgaaggagggctgaccctggggccccagctgccccgtctgactccctgcaccccggccttctccttctatggaatgccctgctggcaatc

SEQ ID NO: 10248 - DNA, 402 bp, Canis familiaris
ataagggaaattttgtcatcgaccaaatgtgtgaaataggtcctgtggtttttcagctaagaagcagaatctcatttcagtacatttagttttataagtcatgaagccagatctttaatgggctgtatttagaggcacaaagtcctgggaaatgtgtgtattcacagtagtgtacattttgtgccttgagtcactttgaaaagtgtctcagaaaacctggacggccagttccttctatcttcacaagaattttatatgtatttatgaaaatgattctgtattctagtaaatctttttgggcatggactaatttgtatctcttcatagtcatattctgcacgatctgtatatagtatatcaaatttagaggtgtgaccttaaatttaacttttttttttttta

SEQ ID NO: 10249 - DNA, 597 bp, Canis familiaris
  misc_feature (1)..(597): n = a or c or g or t
tcccagtggtctgtttcaggatactgagtgagactaaagcaaagctctacttttatggatagtttaggtttcatnnacncnnnagtaaaaaaaaatagttgtttggctgtggttgtttgcttttgaaatcaagaatctttcgttgatataacattttgcttatatgttgattttactttgtgttgtttgtaatccttgcatattcttttttcatctgctttctgtcctataacgcagtcttaatgtctccttctctttttctaataagtgaggaaaaatacattcattttgttttaatgatttcaaacaggtttactttaaggaactcatcttaaattctacatccaaagaaatgtagatgaagttccaaaccagtaatcttataatttaccctgttgaatacagtcacatcttgttctttacaatatacttaaagtagctttgtagttaatgaagtttgtggatatacaaaaatgtgtcttctttaagatgtaccttctttaaggtacaacatgtttttagggacatagtagtcaaatgaaagtaatacatttagtttactttctgttttgacnnnnnnnattaatatttaatact

SEQ ID NO: 10250 - DNA, 572 bp, Canis familiaris
  misc_feature (1)..(572): n = a or c or g or t
gagcagggantngctttaaatnnagtttccagtgctcannaacaactgcatttacttgnngtgcatgaacagattatcactagtggactgaaccaccatattacgcaagtatttgctgcagatttcccatctatattttctcagaagggctaaagattatttgaactgttaaatctttgcatatgtctgtgccactcctgcctgtttctccctgtacttaaccaaggtgttgaacatgactgtcacaactgttattttttccattaagccagaaggatatcatttgatatttatcgtataattgtaacctcagttttaccatctcaatgtaatgttcacatgttgcttcctacattaaaatattttttgttaggactttgtcgtgttgagcaacattttaacctggacaattctatcagccatatgaaattttgcatgtttcagagaagtcagtgagtaaaatattatatgaatatacattgtttctcttgaagtgtataacttctcgagaattaatgatttttttgactgagatttactgtattcatttaatgtaagatgagcctgatgag

SEQ ID NO: 10251 - DNA, 640 bp, Canis familiaris
  misc_feature (1)..(640): n = a or c or g or t
tggtggcattgtgatggtgacgctgtccatgggggtgcttcagtgtaacctgtttgctaatacgtccaccntggcagatcactttgaccatatcagagcagtcattnnagcagagttcatcggaattggtgggaattatgatgggtctggacggttccctcaggggctggaggacgtgtccacgtacccagtgctgatagaggagttgctgagtcgtggctggagtgaggaagagctccaaggtgttcttcgtggaaacctgctgcgggtcttcagacaggtggaacaagtgagagaggagaacagtgggcagaaccctgtggaggcagagtttccagacaggcaggtggtcacttgccactcccacctcctgtctcagcctcagagtgaacatctggccacacatctggaggtgatccaggggccaatcaaccaggtcctccagaggcccttgaaagcctccccatactttgttctaggcctcatggctgctgccacattctcaatcctcattctgtgtctctggtgacctggccagtcctccccctaccctgaggtcattgtggcaaagtctcacaaagtccccctccttgttctccagacacaagtatatatatgctgagaataaatattnnnnnnn

SEQ ID NO: 10252 - DNA, 257 bp, Canis familiaris
  misc_feature (1)..(257): n = a or c or g or t
ttgtcnantgcataaaacagttgnnactcacttattgtaaagtgaagattgttctcctgcatgtgaagtggannnnncagatttctgtatgttctcagtatgcatcactagataataaagtcttttgtgaacaaggcatttgtagccatttttaanannntttgtcttcagtgctggtaagtcaggtaaaccataaatagttaaaaagcaacctttcgtttctnnnnnnnagtctttaaaagannnntttgttaaag

SEQ ID NO: 10253 - DNA, 676 bp, Canis familiaris
  misc_feature (1)..(676): n = a or c or g or t
caggtgtttttgttgttgttgttggtggtggtggtgggtttttctttttttaaagtaggctccctgcccagtgtnnagcccagtgtggggcttgaactcaaacctgagatcaaannntgaggtcaagaagcagatacttaactgattgagccacccaggtggcccaaagatataggttttgatactaattccaagggatacacacaccattatgtttatagcagcattatctacaatagctaagatatggaagcagcccaagtgtccattgattgatgaatggataaagaggaggtggcaatatatgtacacactcacacacacacacacacacacacgaatattactcagccataaaaagaatggaaaccttgtcatttgcaaggacatggatgaagttagtattatgctaagtgaaagtagtcaatctgagaaagacaaataccatatgatttcacttatatgtggaatttaagaaacaagacaaaacaaatgagcaaaggggaaaaatgggagaaatcaagaaatgtactctaaactatagagagcaaactgatggttactacaggggaggggagtggaggatgagttaaataggtgatggggattgaggtgtgcacttgtgatgagcacctggtgttacggaatcgttgaatcactgtattgtacacttgaa

SEQ ID NO: 10254 - DNA, 560 bp, Canis familiaris
  misc_feature (1)..(560): n = a or c or g or t
tgttganctcttgatggaagagtttgcattnntgaaaaaagaagtggtggggaaagatctgctgaaaggannncnncncntcacagctggcccattnnaagangagcggtnnggcttccctgcgtttagtggcatttctcgcctgacctggctggtctccctctttggggagctttctcttgtatccgccacattngaagaacaaaaggaagatcaatatatgaaaatgactgtgtgcttggagacagagaataaacgtccactcacatggattgaagagaaagggcctggtctaaaacgaaaccgacatttaagcttccattttaaatctggttccctggagaacatgccaaatgtaggagtcaataagaatattttcttgaaagatcaaaatatatttgtccagaaacttttgggtcagttttctgaaaaggagctggctgccgaaaagaagcgcatcctgcactgcctatggcttgcagaagaaatccagaaatactgctactcaaagaagtgaaggatgcctgcagcacttctangatgggaccatagtttccttt

SEQ ID NO: 10255 - DNA, 617 bp, Canis familiaris
  misc_feature (1)..(617): n = a or c or g or t
gttgggtatagatattaatgagtactattaattgagtatttactatgncagccatcatgctaaagtttacntatgttatctctgttatctcatctaatccttacaacaattctgtgagttaggtattagcccatttcacaaataaagaacctgagccttaaaaagattaagtaaattaagtggcaggtccaggattcagtatcttacaatgcaggttttcttactgtaaggtatcaaggaaaactgataaaagtcagagtccttgtaaggggcatggtcttcttgtttttgcactgaatcaagcctaacccccaacaaccacagcctcctcctacacccagacttctcatctcaggtctcaggaagtagggggaaggaggtggtcggatggaaaaaataactggacatttttgtgtaaaccataacctgtatgtgctgtaaatggtctcttcttacccaagggacagcctcacaagggtcgcaagagccacttttagggtctgttctcatccagtagtgggaagcttccagctgggatagaaagaggacccagcttcaggcctctgtctccttggatgggaaatggagtatgttgtatcactgaagatttttatttt

SEQ ID NO: 10256 - DNA, 177 bp, Canis familiaris
  misc_feature (1)..(177): n = a or c or g or t
tctcaaatcataagttttgtttttanncattaaangacacttaaannnaatnnnaaagaaaaannnaaaatatcaaaattcattattttgtcnantgtgtntgnagtatcttgtgttacatagatattttagctgtctcatgtttcataaataaaaatgtctttatagaaaaattca

SEQ ID NO: 10257 - DNA, 655 bp, Canis familiaris
  misc_feature (1)..(655): n = a or c or g or t
gnctctctttgccactttgatggcttatgaggtgtactatggactgctcgannnnnagggggtagtgnncacagagcaccaggtnnaaatggccatggcccaggccctgggggaagtgacagtccttggatctctgctgctccagcatctgttgcacttctctagtcctggtattatactgcaaagtctgggtgccttgacgggaccacaacttctgactctagcccagagccctgctgggtcccacgtgcttgatgctgtcctaaccagtccctccgtgacacgcaagcagcgccgccgtgtgctgaagaccctaaagggacagtatgtggctctggcctgcagtcgccatggcagtcgtgtactagatgccatctggagtggagcagccttgggggcccggaaggaaattgctgctgagctgggagaacgggaccaggagctgataagagacccttttggccaccatgtggctcgaaacgtggcactgactactttcctgaagcgccgagaggcttgggaacagcagcaaggggcagtggccaagcggaggcgggctttgaactcaatacttgaagactgaggcctttggatctgggattaggtgttgatgggggagggataaaaggcatatctgtcctttcccctttgtagt

SEQ ID NO: 10258 - DNA, 704 bp, Canis familiaris
  misc_feature (1)..(704): n = a or c or g or t
acgatgctggacngcagaaccagtgannccggcgccgggtgcccagcagannnagcagnnnnnnncaannagaaactgnnngcggcgtccggactgaaaattcttcacgttggaagcgggttgagtccgtgatcctcctcctcctctgcacgtgccacagctcccgggggtcctctctgccagcccgcgggatgaggtgtcctgcgactccatggacgggccacgggggctttcacagctgcccccagaccctgtcgtcactgctgctcctcgtcccatcctcatctttcttagaactgaggaaaaccacacagatgtgcgttcaatataatcagtggcacctgacatgttgacaaatacgagtttctcatgaaagaatgtcttttccttctgaaatgcgtgtaaataccacgtcatgtggaccacggatgtcgtttcaatactttccctgatttaaaggcaggagagccgccctgtgatgtggcagttgctatagtgacacattccgcttttattgaatatcagagtaaacagtcacctgaagtgaagtaggtggcatctggctgtggcggccccacacctcggccagcccgactcggcgcttggcctctgctcgcaccggcttcagcggaagcgggccggcccggggctcctccgagctgttgccgaggctgggattcgacggggtccccgcaagaaaggag

SEQ ID NO: 10259 - DNA, 353 bp, Canis familiaris
  misc_feature (1)..(353): n = a or c or g or t
catttaatgacatgttcatgtcnnnntaagatnnnnttcataaaatccnnnnnaggaccagcagttgaatgtgccctgtgctttgaggaaagaatggatttggatcgtcagtttctctagggcaggactcttgtctctttgttatgtccccaattcccagcatggtttcaggcaaaatagtcattctgaacatacttaagtgttgaatggatgcatggaccccagaaggaaactaatggtatccgtcaaagttatggttgaaaatgacaaacttagcaagtactagagaagatgaagtcaaagactgtggtctggatctccttagaaatcactagacttagggatccctgggt

SEQ ID NO: 10260 - DNA, 245 bp, Canis familiaris
  misc_feature (1)..(245): n = a or c or g or t
cgctggtgcccttcaagacagttgctggagcacacagactcaggcacctgcaagaagccacaggtgttctgtaaccacatggccaagtcaagnnnnantcacaggtggaatgggaaatagtctctgtgcatctgccttcacagctcactcccagagcagaacccctggttttataaaccagcgcagcaggccatctgggtgctgcctgtggggcttccccagcagggctggatagaggcatgttg

SEQ ID NO: 10261 - DNA, 611 bp, Canis familiaris
  misc_feature (1)..(602): n = a or c or g or t
agtnnantccagtncagnngcctctccagcttagtgtgtgtggtcggtctccacacagcagggactggggaagggggtgggaggaaggtgttgtcttttctacatcttcacaggttcagctggaggcagctgatgggcctgggtccagacttactgagatattcttacccgcaaccatagagacagggttccctcactgctggtcagcctcctttggaaagtggactggtcactttgaagaagtgagcaaagacacgccacgtttccaatgagtctttctcccttagagagtagccggcttcttttttatcaattctttctatctgttgaatacaacagtgtgcttttggtgcacattttttagcaatagttatgaattaatggtaaaacaaacccccaactcacttatcagccctccactgggtttgcaggaggggcccttggactaacagaatgggttttgctgggccatttcgtcccgtttgccgagccgtgaggggcatctatgctcccttcctgtcacagatctgaccctcagcatgcttttactttttttttccttccagtcaaaccagtaagtttccagagaatttgagtctgcaatgccaaaa

SEQ ID NO: 10262 - DNA, 573 bp, Canis familiaris
  misc_feature (1)..(573): n = a or c or g or t
gaatattcttgcagccccagaaacttacgagatctctnnnnnnntcccaaaatgacannnnnctcctcacgccccaaacctgacaagaatgtctttcgtcccgagcnctacagagacctcctcatctgcaaagccgcagggattgctcacactcgcggaattcaattccagcgacgcgccggctgccgggctctctgtggagtgcctgggcgcctagctcagcggacgatcggccagcagttccggccccaccggcagcgcgcgccgaattctgggatcgtcacggcaacgcagcgaacctcgctagtcttcctccagaaccacccgctgggtcgcgcggccctgggctcccggcggtgcttcagggcagctttccccacggttttgctccgggcccggccgttagggcctactagagcccgtggcttgggcctagtccggtggctgcccggtgaacaagcaaacggcgtcgtcgttgggccagcaagagatcgccgcgagcacaccaaccaggaatgagatgagccggcggccaggtcggaggaataactgcccaaaaagtcgccgggagaa

SEQ ID NO: 10263 - DNA, 494 bp, Canis familiaris
  misc_feature (1)..(494): n = a or c or g or t
cacagcgtcnngcagactggaggggaaaagtgagaccagnctgcccagcagcagggacagcagcctgaccagcatgagcttcatcagcctgggcagcagtgccctaaactaccgggtgagtagtgggctgctcagctccgtcagcagccttcccaccagnnaggccagcagctgccagaacatcccagtggacggcaatgtgcaaagtggtgtgcaaagtaacaccagtcctcaggaggacaaggctgggggcaaggtcaaagctggcgaccaggttgccaagggggagcagcctgcccagatgtgtatgcctttatgagcaggcccactggccaccaggttcttgaaaaatacagacgtgaggacccagccaacctagacttcacccagagtggttattgccaatacaaatgcctttaaaannnnnnacactgacagttcggaaccatggagaagcctcatttgtagcagggtcccgtgtagcgagaactatt

SEQ ID NO: 10264 - DNA, 335 bp, Canis familiaris
  misc_feature (1)..(335): n = a or c or g or t
ctcccagctccagctannnngngagggcctggctgcagtgctggnntccacactgcaccatggcnnnngcnnnnnnccggggtacacctctggcaagagagcacctgccttttggttgccaagagcagcaaggtaggnnnnncagaccagtgtggcaggcccgggnnaggtgccggcccctctggatggaccagagcnnaggggcgactgnnnnnagcagcgtctcccagggctgccctcccctcccntgcgcacgtngacagctcctgccgggctcngtggctgcagcctgcacctctccaccctctttttaactttaactgatctttttactc

SEQ ID NO: 10265 - DNA, 541 bp, Canis familiaris
  misc_feature (1)..(541): n = a or c or g or t
tttcttttaaagatttatttatttgtnnanncatgagagcnnnngggcaggattcagtcccaggaccccggggtcatgacctgggccagaggcagaggctcaaccgccgcaccacgcaggcgccccaagatgtggaagagacttaaatgcacatcnnnaagtgaaacaaacccatctgaagaggccacagactggacgactcccaccatacgacattctgcaaaaggcagagcttcagggaggtggggggacggacgaacaggacagtgcaggacattctgtagcatatcacaaaggtggacacacgtcatacgtttgtccagactcacggagcgtggaaccctaatgcaagagggaaccctaacgcaaactgtggagttcagttaataatcatgtacccatattggctcatcggttgtcaccaatgtcccccaacacagcaagacatgaagagcaggagaaactatgtgtggcggggggcaggcaggtaaaaatacgggaactctgtacactctgctcaattttcctgtaaatctgaaat

SEQ ID NO: 10266 - DNA, 551 bp, Canis familiaris
  misc_feature (1)..(551): n = a or c or g or t
ttgccaaagtnnatcatcctggtatctggnnnctgcccccgaggccttngacccgaagaatccgtccttcagggccccttgtctctgccgtcactccatgtttttggagacactgactgcgtcatcccctctcaggaaagtatgcagctggctagccgattcactggagccatcacactcacccaccctggtggtcacttcattccagtagctgcagcccagcgccaggcctatctcaatttcttggaccagttaacagagtgagaaatcaacaaatgtctctgcccctaatccctcacccccacatgaccttggggcagcctctgtaatcagttctcttccccccccaccctgcgagctcaactgctgttagtgtttatcatcatcaccaattaagagacaagtatcagtaattaaggctcaaattataagaagcccagctctacactcaagaaaaaaaaagggattaggagccttagtggacattggcatttgatactcaaacatgaaaaaggccggtggacccccggatgagtggagggtaaaatggg

SEQ ID NO: 10267 - DNA, 561 bp, Canis familiaris
  misc_feature (1)..(561): n = a or c or g or t
gcatatctantntgnnnngagcatgnannntntaagtaatannnnagataggtaactngaatgatgccctacttgagacaatcagaatgcnnnagaaaatacaagctgtatcagcttgtatgtaaagaaggactactcagagctcaaaagataaagtgaaagcatggaccctgtggagcaagagatggccaagcttgtctttctgaattttttttccacagaaccctggaaaatttgaccaaattcatggtgagatgcagaagccaggaagtaaaacatactcagctcataaaaggagctgaaccaatagacaacacccaacataaagcctgcatctaaagcactataccttcagtgtgacagtgtccccagaagggacaatttacctggctaagtctgggtgctataggtaagcgatgaggataatctcttccaagagtttaaaaccacaaacctgactttatgtggctttgaaatctagctcatggtatctttgtttttcaaaaacaccaagttgaaaatatatagttgatccttgaacaacccgggttgcatgagtcc

SEQ ID NO: 10268 - DNA, 243 bp, Canis familiaris
  misc_feature (1)..(243): n = a or c or g or t
gggtaatggaaaatgtaaatcccgtgtaaccttattcactccannngtnnnatattatttcattttccccaaagtcctttaattctaactgaacaccagcagtatttttagtaactctttctttagtatacttggaanntnatttattaagctgaactgtctttagacgtaattattgtgaatgtctgtcttattttatcatggtggttccacatggcnnnnnnnttcagtttgtatttttgg

SEQ ID NO: 10269 - DNA, 530 bp, Canis familiaris
  misc_feature (1)..(530): n = a or c or g or t
agacactgttgggctnntatctgtggttgcccccanngcccctctctnnnnnctccacaggaaagggcctnnagaacaagaaactctgcgtgcctgcctctcaggacctttgtggtggcctccttgactcttnnnaggacatcggaggccctccggagtctggcaagctcctcatcgacacctctccatcctgcacatccaggacaggcaggcacaacccaggcatgccctccctagtgcccactctctctctgccctcaggttgctcttctatgggggctttaactacccgcacctgcccctggctgggtgcccactcctccccacccatcccatcccacaagcaggtgggcacatctgggcatatcctgcctgcttctcataaatggcgagcattttgccaacagctgttctggtcagtgccccgaacagtaccccatacggtgctgggcacactgtgggtgcccgctgcatattcactggctggcagcaattgctaaatgctggttggggaaggacacatctttttc

SEQ ID NO: 10270 - DNA, 526 bp, Canis familiaris
  misc_feature (1)..(526): n = a or c or g or t
acacatcnnctgngngctacgtacgagaannctgcaaaccactgnnnnggtatctganntcagaggcagnnnnacaccaccagctcttcnanctgattgaaagcatgctagaatatgaacctgctaagcggttgaccttgggtgaagcccttcagcatcctttcttcgcccgccttcgggctgagccacccaacaccaagttgtgggactccagtcgggatatcagtcggtgacgatcagaccctgggcccccctgcatctcctccagcagtgggtgtccagtccaggacactggtgcttttttatacaagagaacagagccggagcctgccccttcccccggctccttgtatacctgtgaatatgtgaaatagtgtacatacagaagagcttgtacctgttgcgccctccccggctttgtacagagctgttccgtcctgcacatttcccaccctcccctgccccttcacagtggagttggacaggggcaggagaagagaaccaggtgacacctatcccgtgtttt

SEQ ID NO: 10271 - DNA, 555 bp, Canis familiaris
  misc_feature (1)..(555): n = a or c or g or t
ggtcgccccacatgcattaaagnnaccagaagagcccatcacacggtggggcgagtactggtgnnnggtgacggtaaatggacttgacactgtgagagtacctatgtctgtggtgaagtttgagaggcccaagaccaaaagatacaagtactggttagcccagcaagctgccaagggaatggcccccaccaactcccagacgatctgaaccttctctccctcaaaagcagaagaacagattcagaggagcagtggagcaacagtgggccagcgccctgttaccactctcagctctgaccaaataatgaaatgttagcatatggggacatcagcctaaactgcgtgtacacattgaaccctctgtatatcccacccctgactttgaccgttagcacatcaggccttcctgggacggtcttactcaaggagtaccaggttgtagatttgataagctgaatattaatagatgaaatagtctagatcctgttgagcctggaatttgttggaacaaatggaagagctagctactgtctctagtaccggtctcattctcat

SEQ ID NO: 10272 - DNA, 498 bp, Canis familiaris
  misc_feature (1)..(498): n = a or c or g or t
ggacaggnncaacgccccggctccgcaagaagcagtttcagaagannagannttcagcccctnntcctcagaaataaggagagtaaannnnctcaggggaatgagctagcaagcacaggggctgtgtctggtaccccacccctgccctcaccagcggctcacccagaagacaaggcggagctacccgtttgtgagcacgtctccagggatgctgaagctggatgtctgccagaagaaaccgggcgaaaccagattgtgacctggtggaccgtggcgccgacccttcacctacttttttcctctttggagtgctcacggtcagggcccggggtggaggctgaagatgctaaggaggcgtgggaggctggtgccgcctccgcgcctgcgcacagcttcccgaatctccacccctcggttccaggacgtctatcctgccctcctcagcctctttacaggctttctggggttttgtcagcgagcgggccgagaccttagctc

SEQ ID NO: 10273 - DNA, 561 bp, Canis familiaris
  misc_feature (1)..(561): n = a or c or g or t
atcatactngatcagcttcattctctcaacatacntntagctncagcatctnnctattattaacatnnnntaggtgccatttttnnanngtcatgagnnnnatatctcttctatataantgatccatttattttaatnnctgccttttaatttccttttttcttttcnnnnngctacccacatatatattttatatatatatacacacacacatatatatatgtagtcattagaaaagaagatatgaccactttggnnnagatacttcatgttaaaagtgaacgtttcgaaagttttttttttnnntgatgaaagannctaacttnnnataatgccnntttcaaaggtgccattcttatgcaccaagaatttggtgtttaaaagttcatcttgagnnnnnaacgtgtaatatannnnnntatataaagaagaacattataactgataccattgtgaatgggttgaagttgnnnnatgaataattttgataaagnnttcatgcacaggcaaaatgtattcactannnnnctacatagtgatctgcttttactttgtaatttg

SEQ ID NO: 10274 - DNA, 222 bp, Canis familiaris
  misc_feature (1)..(222): n = a or c or g or t
tanntnnnattttttaagtnnnnggaaaaaaaaaataccaccccacaaacctgtatttaaaaagaaacaaannnnnatgtgaaatttgcctttgtccaaacatttcatccnnntgtgtgtgcgtgtgtgtgtgtgtgtgtgtgtnnagccgtccgttcatctttttatatggggtggttgtcttttcttggtctgtttggtcctctccctcgtgggcttgtg

SEQ ID NO: 10275 - DNA, 530 bp, Canis familiaris
  misc_feature (1)..(530): n = a or c or g or t
ctcaccctgacaaagattattgangcaagactaaagatgtatangcattctnncaacaaaaccatgactacaggggcgattgctgcgatgctgtctacaatcctctactcaaggcgcttctttccctactacgtttacaacatcattgggggactggatgaagaagggaagggagctgtgtacagcttcgacccagtagggtcctaccagagagactccttcaaggctggaggctcagcaagtgccatgctccagccgctgcttgacaaccaggttggttttaagaacatgcagaatgtggagcatgtcccgctgtccttggacagagccatgcggcttgtgaaagacgtcttcatttctgcagcggagagggatgtgtacactggggatgcactcagaatctgcattgtgactaaggagggcatcagggaggagactgttcccctgaggaaggattgattggtgtgctgttattaatcactttagaactggttaattttgtatcttggaactattnnnnnatgtttcat

SEQ ID NO: 10276 - DNA, 613 bp, Canis familiaris
  misc_feature (1)..(613): n = a or c or g or t
acnnaaaaactctnntaaaagttcaaacttagatctcagattgcaatgtctgtcggttttcaaaatctctggactcttgaaaagaaaattggtacagaaatgaaaatttgccttgtaacttacaagtgcaaaagatgagttgaaaaaattacaaccaacaacttgtattatattttatattttgtaaatactgtataccatgtattatgtgtatattgttcatacttgagaggtacattatagttttgttatgaaagtatgtattttgccctgccaaacggtaggtgttttgtatatatacaatggagaaattttaagtgtgctaaggcacatggaagaccgatttatttgcacaaggtactgagattttttttaaagaaacagttatctcaaggtgaagatctaaatgtgaacagtttactaatgcactactgaagtttaaatctgtggcacaatcattgtaaacatggggtttgtctatgtttctctaaattgatttctgcattctaatctgtaattactggaaaactattcccatttttaccaaacttaatttctggttttttggtttatccattcaaatttaagatnnntctaattttaatgccaacaa

SEQ ID NO: 10277 - DNA, 539 bp, Canis familiaris
  misc_feature (1)..(539): n = a or c or g or t
actgcagcttcaaaagctcgcgcttggctgggtttctgcccaggttgccaggttgtcgtggagcctcctggtgtcctcgctgggccggggcgtgagcgggggccggggggctcgagcacggtcatcccagcgaagggacgatgctccggcaccagggggctgtaagtgagggtcttgataagggacccggcaggtagtcccatgactcacngagtctcactggcatctcacggatttaaagttgcgagataaacagctgtcattcggacaaacatgggaaacacactcggtggggccacctcgcccagaaaatgaacactgagatacttgctttaattttttattttaattttttttcctccccccccccgccgcccccggggataaaaaaacccagagaaatcaaaatacctctaccaaagcaatgattttgatatagtttccctcaaaaatatttgcatncnnnntacannnnnnnatcttttcaagataaatcacttgtgattccaannntcaagctgctgtatttnttgatataa

SEQ ID NO: 10278 - DNA, 539 bp, Canis familiaris
  misc_feature (1)..(539): n = a or c or g or t
ctgaccgtccccaccagggagcagaccctgatgattgagcctcaaaggccaggaaccaggcacccaggagtngaaagcgctacagtcctccagaaaggggtgattgagtccctccccttgcctctgtcctctgcctgagccgagacagcttcctctcactaaaatggagatgtccccttggatgaactgcctgattgtttggttctgaggcctggtttgctcttacttcctagatggactcctcggatcttaacccttttcctgagctttctttactgcactggacttgcaactccctttgagttgagtgaggggtggggtggggggtttgctttgttctgtggttttttgtttttgttttgttttcgtttttattttgctgattggtgcatattcaggtaccacctttgatacctttgacgtgtggatctctctcctgaccaccatggaaagtgtctgccagattcctttcaaagtttctgagggtgaggctctttttttttttaagggagccaatctatnnnnnnnacttcaagaag

SEQ ID NO: 10279 - DNA, 565 bp, Canis familiaris
  misc_feature (1)..(565): n = a or c or g or t
ctggctcactcgagcagcnngctgcagaggagaagctatgtgnngcgatgtggtgtgacannagagtggtgggagtggcctggnnaagtgggcaagcctgggctgtggaccagtaaggcggatgagactagcagcccttttggagaagggtctgggcagaaggtgaagcagaaatactgattacagcagagtttggaaagtaaataagacaggcactcagttctgaataagaggctaagtggcacgacaagtgacaggaagtgacatttcctccactgtgagacaaagtgaacttcctgctggagtcaaaaaggtccagcctcacctttttttgaagctttcagatctgcctccactacagccatgtcctgcacaggcctttcgtccacctccactctcatataaacaatgctcagcatccctgcaagactgtccttccaattttaaatctaagccttgttgacatagctgttttcatttttcagaccacagtctttgtcaggggctgattatatttataagacannnnngaaaccaaatccaannnnggattgaagcaaatcat

SEQ ID NO: 10280 - DNA, 631 bp, Canis familiaris
  misc_feature (1)..(631): n = a or c or g or t
ttgttcccgctctggnnnnntacgnnagaggagnatgatctcacnnnngcccaagtcagaaacccctctaccaaagtgnnnncnnntccgtttnnaccacccggcgggctccgnnatgcaatcgctgcaggtagggccttggtgcagggcctgcagccgggaagggccgagggagaacacggcggatccctgcctcccgccaccctgcagagggctgccagttcaccgatgatagacacccctttacccacgctcaggtcggacagtgtttttccccgttttaatcagaacaggatgaactctgttaagtgagagaatggacaaagaaccctgaaccccgatttcaggccgtcaccatataaatctgggcggtaaggtaaagtggaggcaaactcggttcttgttccaggtactgcccaagccgcccacctggcactccatccttcaagaactctaccgagcgggctccgggtgcaggaacacacatttaggcctccctgcaggtggtgataaatgctaagaagcaaataggcccagacctattttagggtgaccaaaaaaggcatgtctgagaagagcagtaggtctggggagggcaagtagtgggtggaaggattactaccaggtggaa

SEQ ID NO: 10281 - DNA, 289 bp, Canis familiaris
  misc_feature (1)..(289): n = a or c or g or t
tgaaattgatcaaattaaaaagatttttaatttgtaagtaacttgtgaatgnataattttcttcatgatttcatgttgattttttgtatcaatataataatccacttgattgttattaaataatgttatattttacccttttgttcttttgataattttggaggaatctgatgtttccagacatataatcagaatgcaaaaaatattatttcacttctaaatattattccnnaaaataaatatgtctnnnttannnatttgtnnngaactgtagtaaaagcccctgata

SEQ ID NO: 10282 - DNA, 685 bp, Canis familiaris
  misc_feature (1)..(685): n = a or c or g or t
agtaacttatccaagaaataagaatcannncacatangagatgattcannnncccatgatgattcagttntnnngatcctgtcagannnntgnnnnncaaagtgtacgtacatgtacatgtgttagcttaccatantgaatttaaggtcaagggccaaagaccangactgctactcaggtacttcaaatgcagtgcttaatatgaaatgaaaattggaccaaaggtagaaatgcgtattttcccagttcagttcaaagcaacaagctttgcttaaacattattactttnnnccaggcattaggctaggagctgaggatctgaagatgaacaagacctatccctgctcttcatgacttcccacacccgcatagtcgtttcctcagtcgcactctgtttagcagccatacatgtactggcaaataatttttaaggctaacttaaagctatgtagatgaaactttgaacaaaattagtatggtctctggcttcagtaaagtttttagtgttcccttagacaaatgagaaatgtcttattttctagttaaatttctttaaaaagtagaattttcttattttatccatttgnagtaggtttctcccctttattactccaaattcttaaaattatattttttataaattgtacagtatttaacatttggtagtaaatatttgtctttttaa

SEQ ID NO: 10283 - DNA, 508 bp, Canis familiaris
  misc_feature (1)..(508): n = a or c or g or t
atnnngcaccctgctgaagagttccaaataaacgtttagaaatgaagtgtaggtgtgctcagctgctgggatggacactggtgagaaaggcatcaattcagagaatctcactgcaaatagaagacaaggttcagagtaagaagaggaaacgtttatggaggttttcagagaaaagttttctctactttctctgtctggacactggagccacatacctaccctccccccgagtaggaccctgtgggcctcagccctgagcaagatttggggggaagacctgtccacttccttacttgggccctgtctcctcttcttcatggcggggcctggaccttggtcctctgcctcctcaacaaccctcccaccccagcactgccagccaccctatctcagaggctcctccatcttcatccccctccaaggctgctctccctttataaaagggcaagaatctccttccagcctccctctccaaggggagggaggcagtgnggcgatcacctgtccc

SEQ ID NO: 10284 - DNA, 532 bp, Canis familiaris
ctccttcatgaggtcatcgtctgtgtgggctacttcaccgtcaaccacccggacaaccaggtggtcgtgcagtccggccgccacccgacggtgctgcagaagctctgccagctgcccttccagtacttcagcgagccccggctgaccaaggtgctgttcccctcgctgctggctgcctgcttcaacaaccgccacaacaggaccatcctggagcaggagatgagctgcgtgctgctggccacgttcgttcaggatttcgtacagactccaggtcaagcagacacccgggcccaccagcccaaaggcaaatccctcggttcccaagactatcttgagctggccaacagatttccccaggaggcctgggaagaagcgcgacagttctttttaaaaaaagacaataaatgaacggcctggttggcccgtcgggcgcccgcggaggctctgagtgtcgggaccaaggcctgagcccggctccctgctcggcgtccccagggcgctcggcgtcgagatgtgggtgaagttagactaa

SEQ ID NO: 10285 - DNA, 507 bp, Canis familiaris
  misc_feature (1)..(507): n = a or c or g or t
gcatacaatgacggaagaattagatgcnnagacattcttctggctgtcaatggtagaagtacatcaggaatgatacatgcttgcttggcaaggatgctgaaagaacttaaaggaaagattactcttactattgtttcttggcctggcacttttttatagaatcagtgatgggtcataggaaaacagaaaactacagataagctaagttgaaacaatgtatttatcttgtcaatttttatatttaaaggatacactgtaaaaatgtaaactcttgtcaggaaaagtatgatccaatgaaagccaattacacctcagaaaatgtannnnnnnnaaacataaatctgaatagcttttattcagtgtggaagatttctcattactccacaactttaagtttatatttttctattcattaaaaagatcttaaaaggctgagatcatttgtatccccccagtggattcaaatcctacaattaaaaatttagtatatgctgaggtctgtaatgg

SEQ ID NO: 10286 - DNA, 498 bp, Canis familiaris
  misc_feature (1)..(498): n = a or c or g or t
gtgtaacattttganctcnataangacaaatgtagatatttttctaaaaaaactgtgagggactgacaggtagtcagtgtgtattgtagtttataaacatgaaatcttataaggtttcagtttgacagaagtgtgatatatgtaacttgtgccatggaccaaatggtcactttaccccagctaaaaatgagttacgatagcagcttgatggtgattctattgtattcctttgagcaaaaaggagacatttaatattctaaatatttttatcccaaataccatgacatgatgaggattttttaaaaaccagactgtgctgtccttcatatgtgaagttgacactactgatttgtcaataccaaatgttggatgaaattatttaacttgtatttatttatttttctgtcgcagcaaaaaatgattacatcctaacttttatgacctaccaaatttaagatatgtntacattgttatttacnnnnttctagaaaagaggtt

SEQ ID NO: 10287 - DNA, 635 bp, Canis familiaris
  misc_feature (1)..(635): n = a or c or g or t
aaattgttaatgatgtaaattgagtcccttgtttttttggtttttttttnngtctcgtgtcacataattgttacgcacaaacatgacatagaaaggaagatgctaataaggaaaggaaccaagcacatgctatggatggtcttgaatgcgtgatgaatagtaaactcagattaggcaccgtcttctccctgacctgtcctccctgccttctcagttcagttcttaatctcgccttgggtttccttgtgaagtcagagggaagttcgtaataatagcctaacactaccctgcgccctgcccccaccgtcaggaacctctgttttccagagaggcgcccgtcctgtgcttggatagtcagtcaattatttgtgtatgaaacaatgtacaaatcaatgttttgaaaataatgatctcaaactttctaagttaaattttaaaaaatttgatcgtttgccatattgggtgggtttactcttagaatcgcatgctgtagaaatgctcaaaagcgcatataggactcagtccttagatgttctttttcttttaagaaataacctctttacagttgtaaccactgcggctctgtccactcactgctgctattctgtgcacaagtgtcggaagcagtgcagcca

SEQ ID NO: 10288 - DNA, 602 bp, Canis familiaris
  misc_feature (1)..(602): n = a or c or g or t
aggggnaagtcaggaaaccaaagtaccagcggtcaccatatacagcactacttagatcctngtcttatctnatccatgcnnnaggctggtnnnagagataggctcagagaggatgggtnacctccctgaggtcacacagccatgcatggcagtcatatcaacattcagtcccccggtctatcttctactgtctgactccacttgagttcacaccccatcatctctggtcttgtatgaggcatcctccagcctggctttgtttcccttctctttcctcctccctgcatccaaagggcttgtcaaaatccaagcccgttcctatctctaaactatcctaggatgacaaccaaattccaagtttggcatccgagattataaagaaattcatccctatgttgcctcctgtgatacccctgataccctccagagaaacagtcatgcatgctctgcctccagtgggccactagttttcttggctttctcctttgagtcagcagacttgagttaaagccagcctggttactcatgagctaggggaaatccaagcaagttatttcacctctgggcttcagtctctccaaggataatcatccctaccatga

SEQ ID NO: 10289 - DNA, 536 bp, Canis familiaris
  misc_feature (1)..(536): n = a or c or g or t
gcttttgttttttcctccttcattgcaatgtctttgtctcccttgaccccttttactttgtgtctcttaagtctatttaagattctgtctctgcatttttttttaatcttctctatttgctgtcctaggaatttaatcagcagaattacttttttgatagggaaggtagaaggtgtggtctgtaaagttctaactgctgttttctttctcctcacaaaggtgacttgtggcagatttaccccttccgatgccaccaaatcataattttagagactctgtgtcccagtggactctctcctcatgcaccagagatgatttggtacttcctcctttatgtctacctcaccagcctccctcctgacttggcccttttccctctactcacatctgcagatttctgcttacacttttatttcagggctttattcccgagcctgttctcaccctttccttgcctatccagaaggatgctgtgtctagcatcttgctgtaaannnnnnncagtgattctgtgtaaatagctgtggccacgccca

SEQ ID NO: 10290 - DNA, 402 bp, Canis familiaris
  misc_feature (1)..(402): n = a or c or g or t
gaagagctgagcaccaagtactccgtggacctgatgatggtgagcgaaggaggcccctcgnnnggtggagggncnnngtcccaccggtcccactcggggccccgacttgccgggcgatgctgttacccgccctgcacccagggacgtcgcccagcaacacccccaagagctcagggtgacgtgagagaaaggagaaggggcagggcagctctccagccagggtcctcgggaccccctctctgctcccacgaagtatcaagaccctaaggagctttggtttatgtgaggtacgtctacccacgatgatcctattcaacacaaccactgagaaaattaaaaagcactccctgattcatttcgaaatgagggtagatnnnnnntatatgagtaaaaataatattt

SEQ ID NO: 10291 - DNA, 603 bp, Canis familiaris
  misc_feature (1)..(603): n = a or c or g or t
tgttaagtgcacagatgaaaacatatatngtgggaaagttatatgtacaaatattaaaaatatgccagatatcaaacccatgcatacaatggtccagattccttatagagatgactggtgttggagcatggatttttataatgttaccgatatccctgatgatggttatgtggaaattggcactctttgtgccccagaaaaaatttgttataatttctcctgtgttgattatgctgtgctcaactatgactgtgaaccaaaagaaatgtgtaatgggagaggagtttgcaacaatttaaagcactgccattgtgaggctggctatgccccacctaactgcaaaactataggaactgggggtagtgtggacagtggctctcctgctgcagtaaagggacctgaaaccactaccattgttgaaaaacgtgaggatggtttcttagaccaaattatcatatcatctttggtattttccttcctaatattattagtcgtaattatttgtatcattatcatttgtaaacgtgcaagaggagctcctccagagcccacagaaaagggtccagctgaggctgcagtaaagcccccagaagcagagcctga

SEQ ID NO: 10292 - DNA, 461 bp, Canis familiaris
  misc_feature (1)..(461): n = a or c or g or t
taccannntgcattattattttgcttntnnnnnnntnnngnnnngtgtnnnnntactggnnngagttttacgaagaccnnnncctacttgtnnntaacatcctcaaggcccagcacgattnnnnnggcttggcagacagtnnngatcatctttagnggggagctgttnnnngcgtctagcattagaaaagtannaaaaccagataatgtannnacatgganataaaaaattttgtatttgaaatcttaacatgnnnaatannnagtgtagtttattatgacatctcctaaggcatctgcaaaggtatnctagacaggacaattannggtnnnggtttgggaactcagcttnnnnnattgccgtctgagacacanngggggnnngntgaacctgcatctacattcaactattcccaaaattcactaggttaccctatatgtgtagaaagacttgctgagtag

SEQ ID NO: 10293 - DNA, 308 bp, Canis familiaris
  misc_feature (1)..(308): n = a or c or g or t
gcttcacttggatcatctcaggttatttttnnntctaaaactgncgnnnnnannnnnnnnntgttataantctcctgagactggataggagctgcattaggttgatgtgttgtcaggtctctgtggggagggccctcttccctcctgcatgggaggcggactctgagcgggcgagcccggggactcgatacctcagcatgtggttttggtttgtggggaatggggttcctccgtctggttcaggagtcgtcgtacgttttctcttagggacaaaggtgaaataggagcaggcagtgaggttttagtac

SEQ ID NO: 10294 - DNA, 583 bp, Canis familiaris
  misc_feature (1)..(583): n = a or c or g or t
aagatgagcatgacagnnngacaagatcttgtnnactttnnnacatcaagcccatcantaccagccagtgaagaangatnnnnnnntatnnnnnnnatcacaataagaccaccagatgaccaacatcntnnnactgcaaacacttgtattnctcgactttacgtcccactctattccnctaaacagattctcaaacagaagttgctactcgccattaagaccaagaattttggttttgtgtagagtataaaaagtgtgtattgctgtgtaatattactanctaattttgtagatttttttccatttgtctataaaagtttatggaagttaatgctgtcacaccccctggtggtaccttaaagagattaaatgcaaacattccttgctgagtttgtagcttacaggnnngaggagcactagcaacatttgaatataatggtttgctagttgacaacttctgggtctaaccccagccaaagatgacagcagaacaacataatttacactgtgatttatctttttgctgaggggaaaaatgtaaaatgttctgaaaattcactgctgccnttgtggaaagtgtttc

SEQ ID NO: 10295 - DNA, 638 bp, Canis familiaris
  misc_feature (1)..(638): n = a or c or g or t
gtcaaaggtnnnactgcccaagtcaatgcctggtnntgagcagagcagcagggtttggttttctgtctcagggtaagactagtaggtgtagtctgcatgtgagctcttctacatgtgaacaatgaagaaacattcttgtccttttttccccccaaaataggcaacctttttcttgttatacatgttcattataagaagtaatttaaacaatgctgaaataccaaggaggaaataaaattaaccctaaatccaaccaccctgtaatcaatgactgacagtcagctgttggaccttccagccttttaacttttttttttttccagccttttaactcttaatgtgaacacatctctattttgttggttacaatagctgctgtgtatgggcacatacagtatgtcaggccttatgccaagagtgcactggcagcagcagctcctgccttagggtctttgtccatatctgttcccatggctacgtgagacacgattcctcaaaattttaggtttcttctgaattgtcagagtcctttgttagttgcatcacacccactactttcccttgatgatttgtgccattgtctgctttttactgtttaatgtctgttctttcnnnnncggaagctctcagagggtcag

SEQ ID NO: 10296 - DNA, 44 bp, Canis familiaris
ccctcattagcctttccagcagtttccagtgttggacttaggat

SEQ ID NO: 10297 - DNA, 612 bp, Canis familiaris
  misc_feature (1)..(612): n = a or c or g or t
tgcagccgcnnnggctcgcaaacctccagcatcncncgnngctcacaggcancngattcgcaccccgggctgnnnnnnngctgggggcggggcctcnctcggccggctccgccccggccctggcagagcctgaagccagaatcccactcgcaggggggcnnacgactggtggcagcgactcagagagccttggtctgcccgccgccggccctcggactgactgggcacaggggccagggcggccttcttacgcccatgatagggagttgggagtaggaggtgtggggaaagcctgagccccggagctacacaggaatctctcggcaggtagtagtccccaggggacagagccctccgcctagctcccaaaacctgacccaaagggcggaactacttccaagaacaaagtgggcagtcgctagggcaagctgcattacagactggcatcccctagttatgaatagtaaacacatgggtgaatgtgtgcacgtggtcagtgagggctcccgaccatggtgggagaacctcctatccccccgcaccccccaccccaattcagcctttctcatccccaagtcccagccagggtgactggcccagtctgttcctccc

SEQ ID NO: 10298 - DNA, 490 bp, Canis familiaris
  misc_feature (1)..(490): n = a or c or g or t
cagccaatgaaatgaaaaaacagnnnnnaggtgacaacagtaagaccaatnacagtcgttccaaaaaccaggaaaatcaagatgttccaaacatgttggatgttctaaaggacttgaataaggttaagcttcgggctattgaacggtcacctggcggtaaacccattcataagcggaaaagacaagattcacattgggatccagtgtctttaatatcccatgcacttaaggagaagtttgctttccaagaagatgattcctttgagaaagaaaataggtcgtgggaatcttctccattttctagtccagaaacttcaagagtgagctataataatgtgaagttaatgttttgatttttttttaaaaagtgnnnnnnttcatgatatatctttgccttcaagttctcttaaagtacctgtgcagaacaggctatacagttgttgctggtactgctaatgtttctgttgtttctgttaactttcacacattc

SEQ ID NO: 10299 - DNA, 575 bp, Canis familiaris
  misc_feature (1)..(575): n = a or c or g or t
agaccagttcaatgnnaaagagtactaaagtgtntccttnnnntgtgtgtttctaaaagtcatttttaaatctctttatcctgtacattaatttgaagtttataaaaacttcaaaacttgtcagaaactcctaagctctgggatctctgtggcatttctagtgttctcttaattatgtatccagcatgttttaatcactggaaacaatgagtggaagagtagaaacagaaagtaatctcaggtggttcttcgtgagcaacaaagaatctgccaaacaatcatgttttccttgaattttgcaggaaaagaaaatgcaaagcattgcttggatattcttttaagcaagtatcattttatattagctaaatctctaactgaaattatgaagacaagctttataaaagctttagtatggagtataacaattatattttccttttgtgcagaagtgaatgagttgcatttgtattccactattcaatagaatatgcttaggaattaatgaggtcattgtcagcctctatacaaacggagctgatgagttactgcttnnnnncatcactccatgtctaatt

SEQ ID NO: 10300 - DNA, 473 bp, Canis familiaris
  misc_feature (1)..(473): n = a or c or g or t
gtcgttgagctcagcccgggcccgctccccatcgctacacttnnactgcagctnntgcagctgcanntccagcttcttcttcttgtgttccacctnntgctttgcctggttcaggacccgcagctcaccggccaggnctgcgttctccttctccagcgtctgcttattcttgtnnaggttggccttggcctggccaaacaaacagaggggaaggaaagcatcacagctctgaccaggaaaacattttgagatgggagcccacattacctggcacaccacttgctactgtttcccccaacccctccccatcaggtaggttccagggactcaggcttgtccccgcaggggaggaacatggcaacgtggcggacacacagccaccacaagactttctgtattctgtttttctcaagctcaaggtgacaaaccagcattccacgagctacatccaacctgctgtcacatcctgtttg

SEQ ID NO: 10301 - DNA, 633 bp, Canis familiaris
  misc_feature (1)..(633): n = a or c or g or t
ctgnaaaagtagaatcaagtctcaaataannnctttttaattgtatcctgtagtattatagatgtannncagtactgtatcatacctctgtgaatgtaaaatatcttgtacctgctttatgatacgtaatagtgactgtgctttatgagagctgttttnaatgacgttatnctagaatgttttctttccagatgatgattgagaagctaataaaaaaatggtgccaggtaccacaacagtaacagaactttgctgttttctggggttttgtttttttttttaccctttttttttcttttttattaatggagtgtgctggatgtctctataattttgttcagatgactgcagaacctggaaaagctgttgctgctattgatgcataacatactgctattggtctttttatataaataaataaatatatatatacatacatatacatatatatatataaataatttgaatttttggaaactttagctgtgctgtcaactttggaaaaagtatcccagttgtaccgtgttgggttggcattgtacagaaattaacagccatattggtctagaaatgttaaacataattttttccatttgtacaggggtaacgcactgtattaaatatgtaaggtct

SEQ ID NO: 10302 - DNA, 342 bp, Canis familiaris
  misc_feature (1)..(342): n = a or c or g or t
gaaggcnnnnannnnnncganngagccacagaggcatccctcagtnnnnnnatgtcntagtgatnnnnnnnnnaaaagtatcttctcaataacctanntttcaaaaccccatagactcaaatgtcctggagccctaacatcactttcccctccatagtgaagtgnnnannnaaggtagaagggaatgtaaataaaataaaatttccttataacannnagcccgttgacaaataatttaggcaagcagaatataacatccctccaggaaactcccgcngnnnnnattttaatgctttgctagagggaaaaaccaccttagctcaacaatagnnaggcctccag

SEQ ID NO: 10303 - DNA, 480 bp, Canis familiaris
  misc_feature (1)..(480): n = a or c or g or t
ggcccagggctcccannattcntgcagctttgaccgagnnagtcctaatnnacgcatggtggttagngacnncaaccagatggccannaggggtnnagggaagataaaggagagggaggtagactctggccttgggtctgaacgtgggtgggacctgagaggaggcgagcggagatggcgcaagctttggcacagagatctcaagcagggcggactccgtgaccctggcaagaggccaactgcatgccttctgtccaaacatccaagtgacttattttcccaggtgatgctgtgggacctgtgaacagtacaatagctaacaattcttcttcttcttcttcttcttcttcttttttttttaaatcagaatggtatttaagcaaacagagaagcgagaaaacagactgtatgacatatggggcaaagcaaaagtaatcttcaaggacctcctttaaaatgtagggaaagggatccctgggt

SEQ ID NO: 10304 - DNA, 510 bp, Canis familiaris
  misc_feature (1)..(510): n = a or c or g or t
ctagcagtatcatccacatgagtgncntgaatgaatacgnnggnntttganctcacgtnagggcnngtgtaaatggtctnnnnnctnngagagattgcagcagttgccctctctcttgctgtgggttgcttacaaaaattagcacccaaatacatgatacttggannaagacaacccactgaaatctgagaaactgcctccaatgatcatgagctgatcatttgtgcatctttcatctttcatgaaggacatagtagctagtgtcttttgacagttgtgctttacaagctgaatgcctggtcttgttagactttaattgaatgcgagtctaatcttttcagccttgtaaatgggaaaataaacattaaaaatgtcaaatacagcatttccttggaaaccaccttagaacattagtgctgtggttatgagtgttatgtgttagtacttctcagtcaataaactgtggatgtgagcttttgcaggctgcttctgtgcagccagtgactataa

SEQ ID NO: 10305 - DNA, 408 bp, Canis familiaris
  misc_feature (1)..(399): n = a or c or g or t
cattcagcattgggattgcaaagnnnngngagatgagtggcccataggtctccannctgcttttgtnntttaaggctctataccatgcancnnnaatatgagtggcnnngaatttgtatgtcccaagcttttgaggagtttannngaatgctggtgacagggggagaatacacacttcctttttaagctgactatgtaatgncaggatttgggtgaggtnncttggcaacatcttccctaaaactttcatannnctgaaaacccnngagcctacnnngaatagnnnctggtgtatnnnaagtnctcannnaatatttgtagaatgagtgtagtagaataaaaaaggcnnngggtttaatagctttggggacatattgcatnaatctacnnaannnntcataaataaaa

SEQ ID NO: 10306 - DNA, 238 bp, Canis familiaris
  misc_feature (1)..(238): n = a or c or g or t
ctgtcnnnacctgaatctnctgtgaannccttaacccaacannnnaaatcttgaatagctcatgccctgctcttaagaattctgtctctcgnnnttaaaaaaaaananaccttactttaaaaaaattttttaacctagtcactgtttacagttgtatnctaaagcctgaaatattgtctgtgctgtggtgtatgagcattgccaattttatatttattgcagtgaagaagaaactaaa

SEQ ID NO: 10307 - DNA, 595 bp, Canis familiaris
  misc_feature (1)..(595): n = a or c or g or t
atgcagcctattccaacnnttggttttaatgtgnaaactgtagaatataaaaatnnaaagnnnactatttnngatgtaggtngaaaacacnaattaagaccattgtnnnaacattattacctcaatactcnnnncgttgtatttgttgttgacagcagtcatagagacagagttagtgaagcacatagtgaacttgcaaagttattaacggaaaaagaacttcgagatgctttgctcctgatttttgctaacaaacaggatgttgctggagctctgtcagtagaagaaatcactgaacttctcagtctgcataaattgtgctgtggccgtagctggtatattcagggctgtgatgctcgaagtggtatgggactatatgaagggttagattggctctcaaggcatcttgtggctgctggagtattggatgttgcttgattttaaatgcagcagttcttcaaagttttgtggttaagagttactttgcacataatataagaaattctgcactcaaagttaatttaggatgtatacttaaaaggactttggggaattcagtacaatattgctttttaannngttactctgtagtaaa

SEQ ID NO: 10308 - DNA, 519 bp, Canis familiaris
  misc_feature (1)..(519): n = a or c or g or t
tccgcagactnnagngcgnnntgcannnnngccaggagcaaacnntacgagaggtggtcgcagtctcaaggaacatgcagaaagagaagctcagcctcctgcgacagctggagctcctcagnnagctgaacacgaggctgcgagaccagagggatgcctgtgaggccaagcggctgggcagtggccgaannnaagccctggcagtggcgcgcccgccagggcccacctgctgctgttgctgctgctgcagctgggctcgccctccaagacgtggctctggccatcttcccagtgcccgctgaccatccctgagtgactcactgggcgttacttggagaagctgccccttgaaggtggtgcatcgtggctaggggctgcccatccaggatgtgggctctattccgtggactgcctggcctgcctgcatgtagacatgaaggaactgaggagcggcccgtttcatgttcctccctgctggtccccatcctgtccccattccatcaaaccgatctctgacca

SEQ ID NO: 10309 - DNA, 527 bp, Canis familiaris
  misc_feature (1)..(527): n = a or c or g or t
caagagagactatgtttctaaatatgtcaattacatcttcaacatctctgtgaaggcagtttatgaggaatttcaaagaggattttacnnagtgtgtgacaaggatatnnnngaatttttccatcccgaagaacnaaaagatgtggttattggaaatacagattatgactgggaaacatttgaaaagaatgcacattatgaagaaggatatgataattcacatcccaccatagtgatgttttggaaggctttacacaaattgactttggaggaaaagaaaaagttccttgtgtttcttacaggaactgacagaattcaagttaaaggcttaaagaacatgaaaataacattctgctgtcctgaaaatgtgaatgaaaaagatcccataagagcacagacctgtattagtgtccnctaccttcnnaaatattctacgatggaaagagtggaagaagcccttcagnnnnncatcnncnnnagcagaggctttggctgatcttgcctcacacacatcctttacctcnnnt

SEQ ID NO: 10310 - DNA, 532 bp, Canis familiaris
aacagggaagctgtattctttaatgaccttcccacatggtgaaaatcagaacttcctacttgttgcacaacactctgtggccaggctgtgttgggtttgaattcagctccagctgggtgaccttgggcaagtcgcttggacctgcctccatgcccttatgtataaacacgagctgacaaaccccatgtgtgcagttgttacaaggattagatgagttaatgacatgtgagtactctgtggtgcccgctctgtagtaccatgggggtgttggcttctgataacttctaattgttgtgttccacaatggttttttctacccaatatttgcctgatgccaagttctgaacaaggcctctatcctcagagaactcggtcccctcccctcagttcttttcaggttctttgcagcatctcagatactgatgcagacccggccctttccccgtgtcctctctgacattaagcagactcccctctctatcctggcttgggccaaagtaatcctccaagtccacggcaaggcctccctcct

SEQ ID NO: 10311 - DNA, 627 bp, Canis familiaris
  misc_feature (1)..(627): n = a or c or g or t
gatcagctactccaaaantnacagatcacaannncgtcaaggaanaggctcacggtgnnnnnagcnnactcagagannnnncatatcngcgtgtcnnagcannacttcnnnctcttnngcacgctcttcctgctcatgatctccttcttcattatgtnnagccccatcatcatcaccatcctcctcatcttgatccagaacttcaagcaagacttggtcatctggccatccctcttcttctgggtggtggcattcacgtttgccaactcggccctgaaccccattctctataacatgtcactgtttaggaacgaatggaggaaaatttttcactgcttcttctacccagaaaagggagccatgtttacagatacatctgtcagaagaaatgatctgtcaattatttacagctaattaaattttctctataggcagtttatcaccctctggaaagccatgatatgttctcaaagggagttaatttccaggtgcatgacatcaatgtagcctgctttaagaaaatataacctatgcaaatacatatttatagcaccagtaaattaaagggtgatcattaggtttaacaattttaccctttataaaaatttgctatgcgctccttttaaa

SEQ ID NO: 10312 - DNA, 480 bp, Canis familiaris
  misc_feature (1)..(480): n = a or c or g or t
gtaccttgtccaaactatgacaatgttggtggtggtttagtgcaggcttgggaactgcattaaatgtatataatgactttggggtgttacaaagttgtcaaatacaattgagttgttctatttcaagagtttccagtcagtgtaactattttacaatctctaaggacagaaagagttttagaccattttttaaagctgaaaccccgaagactgctttagcggctgacttagaggtaaacttattgggggaataagtgacccatttatatagactgaagcctctattcaaaaagatgttctgtgttctctggcatcttaagaatattttctctgtaaatacacctcatttccattctagttaggagtaatggacccgccctggcaaacagttgaagaacggagaaaactggnnnnctgatatatcaaatagttgttggcactcagaaccacctcaagtacagccatccaaaccaataatta

SEQ ID NO: 10313 - DNA, 293 bp, Canis familiaris
  misc_feature (1)..(293): n = a or c or g or t
gaagatgtagaccagtgctgtcaagcactttctcaaagactgnnnacacaaccatatttcttcaataagcagcctactgaactagatgcactagtatttggccatttgtataccattcttaccacacaattgnncaatgatgaactttctgagaaggtgaaaaactnnnnnnacctccttgctttctgtagaagaattnnnnnnnnctattttgaagatcgtggtaaaggcagctcatctatcagatcatcgtagagatatgtcttaatttagttattattttaaaaaacaac

SEQ ID NO: 10314 - DNA, 579 bp, Canis familiaris
  misc_feature (1)..(579): n = a or c or g or t
atactgactgcctctctgnnaaatttgcactgttacgccttggtnngatntgttcccacattgaagtagagtgttttaagttaacttcattttgtcagtgnncttgttttttaagaatttttgaaatgcttcagactgattcagtgaactttttatagtgaaaaagccatgaagccagtcgacaagacggatatcctctctactggaggggatacacgtcagcattcttgcaaaggtacagagtcctcagctgggcttaccaaatttgctgtataatccacgtactctactcgacttgcatgtctttgggttcgaagcgctctggggtgcatgtacatactgctactgtggtcctaccattgcgtaagtgtgagtcatctgtcccactgtaatacgttgtgaatccctcgtactgtactttcatcgttgtcctcttgcattgagatacaacagcaatggcatttttaaattattgttaaagatgaactggcaatatacagtgtttactcaaaattttcttgtttaaggaaaagcactgcaaanngtccggagggtaccaaactgaagcaaaggatggtc

SEQ ID NO: 10315 - DNA, 447 bp, Canis familiaris
  misc_feature (1)..(447): n = a or c or g or t
ctgttggggcgctccnnnccctacctnnggcccttgcgaccacacccattctcactgtgaatctccccgctggggtcnnagcgtcgggcagagttagggagcggggaggggactgagccggccggagggccccccaccccctgctcccgcccgccccgggactgataatgtgaagttcctcattttgcacaagtggcactagccccagggccaacccttccctccctctggagtcagagggctgagacagccctggcctaccggtctcccactcccgcagtgtcctccccatccctcctttccctggggccccggaccatatttattgcatgcgccccgggcggccccccacccggagcccaggctgggctgggctggaatgtggtctctttagctccctcctccccgtttgtatatttcctaccttgtacacaggctcttccagag

SEQ ID NO: 10316 - DNA, 541 bp, Canis familiaris
  misc_feature (1)..(541): n = a or c or g or t
ggccaaagacactgagtnngagccagagnnacntccagaagtngtaaagaaagggtttgctgatatcccaacangaaagacaagcccgtatgtcctgcggagaacaaccatgccgactcggaccagcccccgtctggctgcacagaagttagcactgtcccccctaagtctcaacaaagaaaatcatgctgagacctcccaaccaacagctggtggcagcagatcacagaaggtcaaggttgctcaacaaagcccagcggattcaagcactgcattccgagaacccaccacgcgggtcagtagccttcctgagaggagttcggccgacagccccagggagggcctgagggccaagcgaagccggctcgcccccagcccagaagctgtccctgagtccaagagcagcgagaattgtagggtccaatagaagcgaccctgtgtgtcaggaccctggaaggtggcagtatttaaccagaagaccatgtgcctgtaggggctgttgtttcctcagggagcacgttatcagtgggaagaaaacatt

SEQ ID NO: 10317 - DNA, 194 bp, Canis familiaris
  misc_feature (1)..(194): n = a or c or g or t
attaattccagtccatttcctgctgagtctaatagacaatgtgttgttaatcttacagtctgttacatcatgcctgnncttttggtcttatgaatgcaaacttcattttctccttagaaatcattttcttgttctgtgactatgtttcccttcagtgtgaagttgcaaatgatcttgctgagagaagcaaacaa

SEQ ID NO: 10318 - DNA, 614 bp, Canis familiaris
  misc_feature (1)..(614): n = a or c or g or t
agagatcagtgggatctgatgagcgcangannaaggagacgcgctgacgctgccatctgacctcccctgcagcttcggcctctcccggcgtccgggtgcccgggnngcgcactcgccccggctgctgcaggagcgcccgccgccgtgcgggtcccggagactggccaccttgccgccccgtttgctatttgtgacacctaggaccgcacccgaccagggctttgtggcttatgcacagcagctgctgctgtgcgtcgctgccgggtggcgatgtcctggtgaagtggcccccccggcggcaggtaggcgggggagtggggcccccgcggtagattcattcagctcagcttgctcttcccccgcgacatagccggtgacgaaggtcaggaggcgcgcggctccgggtgatcggagctcacgggcccggggacacggtggccgcgacacgtcctttagcggcttgcagtgtcctgtcggggaagcggtcagaggtgagcggggccgcgcgggagccccgtgagggcccgtcacctcctccccggtgcgcggggaggcctgcgcttgggagctggtgcccagcccgggccccggctcctccaatacgcggacgtgaa

SEQ ID NO: 10319 - DNA, 533 bp, Canis familiaris
  misc_feature (1)..(533): n = a or c or g or t
gctgcttcacattgaggnnnacggggcacagatagtagaggnaggagacactgcacatgataccctctgactggcgtgagggagttgcagcagtttctccttcaccttgaagctcaggctggccggtggaagccagaggagaggcgcaggacagcgggaagtgtatacgtggatctcgcccctggtccctggcacaggaatcctgaagctcttgtaatttcttaggttgctctaatgagatgactcttgatggctcctcgatgacccgtcatggcaaagaccaagcttggaatgcccagtcccagtcccctttccttgagaagaaagaaaggctgaggatgaagttagtgtgctatcatacctacgtgataaagcctctacaaaaatcccaatagtataggttcggggagccttcaggtgggcaaacacactcctgtatcaggaaggagatcgggagacataacccagctccatggggacagaagtgtctgctctcaggaccctcccagatctgtgtatctcttcatctggct

SEQ ID NO: 10320 - DNA, 97 bp, Canis familiaris
  misc_feature (1)..(97): n = a or c or g or t
ggttagcacngnannnnnnngnnnnngatgttttaatatccataggagaaaaggagtgnnttaggtccgcctttnnnggagttacatattgtcattt

SEQ ID NO: 10321 - DNA, 583 bp, Canis familiaris
  misc_feature (1)..(583): n = a or c or g or t
gttgngaactctgtatacacattgagnagttnnnngcatatacaaaagttcttatcttaagaaaataatcaagcactcagcaaaaggaccctttaaatgaatcttcttcagccatgtnntcagagccactcttctatcagcaagagtnctcagttgcaagcagtgaaaatcaactctggcaccttcacgagttggtattggaggctctagaatcagcagacacaaaaggtcnnnntttgaaagattgttggacttggaagctagacaggcataaaagaattctctgattgtcagggagnnnaattgcaaaaaagcaaacattcagtttttggaagacagccatgttgtaccatccatcagtaccttttaccaccaatnnnggacagtacagtgacttcaagtgagctctaatcctcattcatnngagcnactntnctggactctaggggcaggaaagagggagggtatccccccctacccactttggcttccactgtgagggtaggctgcttcttcacatggggtctcccaccaaatgagaggaactgttgagggtggctattgaaaatcgtcatatgtcact

SEQ ID NO: 10322 - DNA, 525 bp, Canis familiaris
  misc_feature (1)..(525): n = a or c or g or t
ccatgaagnnagaaaatacggcttcttcatgctctattctcagcatctagctgaatgcctggcaggtgatcaatagagttagataaatgaaagcatgagncttccagcacatagcttctttggtaattcttacttacagatcacatatataaagcaatgagcttgagggctagagtgtttaaacaccaaattgccggcaacctggttggtattggtattaagtggagaattttgaaatttatttccctccttcaggtcttcagcaccaaactaggtcagctggagtctttccctcacactgaaggagccagctatttcctctaaaagtgacaaagttcactttacagaaagtacggattcattgtcaccactctcaaccgtacagtgagtcactcagttttgtatattctctcctgatctattcagattagctgtgaattacaggcatggccagtgtggcttgggtcttctctgtcacagagtcactatggtagtctcctcagtggatctctgaatcccccattg

SEQ ID NO: 10323 - DNA, 496 bp, Canis familiaris
  misc_feature (1)..(496): n = a or c or g or t
ccgtgagagnnnggcctgtgccaggcgtgccctaggtataaaagtcacacagcatcatttctgcctgttcttttcattaggagtgaggtactgagnctggcccatcacctgaagagggtgtccgggaacttgcagacatgatttaaaaccaccacagtaaccattattttcaagttagcttattggcacattattgcctgagaaaaccagccttttaactaaagtgttctaaacttttcaagaagggctggattttgctcttacattgaattttgaaagattctgtgtcttctttattatgatggttcattggttttattctgtaactcccaacagttttcttcctgacagttgtttaaaatgagagggaataatggtaggttccctttcaatgctgtataattttagtttacatttctctgcattttgccatcaagaaaggcagcttcctttggtgtaatagtatatataattgttggttacatgctaacattta

SEQ ID NO: 10324 - DNA, 468 bp, Canis familiaris
  misc_feature (1)..(468): n = a or c or g or t
ctgaggtttggggcagccacccgagaccacttaatagtaactgctggctggtaagcagttannagaggtgagggtccggccggccggctcctgccagccggagttagctctcgccagggtccacatccctagtcagtcagatccagaacctgagggtttcgatctgcctgggaaatgtgaccacttccagcacccagcctgctgaggccaggggtcttaacactactcttcgtttaaaggtgagaactagttaatctggaggtaatactaaccagatgcatnnnnannnannnnnnnnnatnnnnngtcataattgctggtttnnnggtttgatttcctattttccttagagtaacatcaaagccaagaaggatggttttaccttnnnnnnnnnnnntgnnaatatgtannnnnnncgtttttaaatgtgtttcttcatgaatgcttcatttggctccaggaagcnng

SEQ ID NO: 10325 - DNA, 371 bp, Canis familiaris
  misc_feature (1)..(371): n = a or c or g or t
agaacacactaaaaactttgtcttttttcaccagaataatgtgccagttttttgtagcgatgttatttctcatggaagcagaaatgctttgtaccagagcacctccagactgcactgagaaggggctctgcagccatccctgtttccagttttatataatttataaagaaagattaaagccatgttgactaccttgcagccactggagctaacgaacccttcattgcatctgtcttcccaggagagaattcagcaaagcagagagatttggttttcttttgatgtgcagttacaccatccattctgttaaataattttgaaaaatataccctccctttagtttgtcgggggatataaattnnnnncaggaa

SEQ ID NO: 10326 - DNA, 502 bp, Canis familiaris
  misc_feature (1)..(502): n = a or c or g or t
tttctgnncagaagaantagggnctccannnannnnngaactctcttctctctcccccttgacctccccacccagttcagcttttacacaagctgagtgttcgagcagctgatggcccccaaaaactcctgaaggtaattaagaatccagtgtcagatcactttccggttggatgtatgaagattggcacatctttttccatcccagtcgttagtgatgtacgagaattggtgcccagcagcgaccctattgtttttgtggtgggggcttttgcccatggccaggtcagtgtggaatatacagagaagatggtgtccatcagcaactaccccctttctgcagccctcacctgcgcaaaactcaccacagcctttgaagaagtctggggggtcatctgacagtagtgtcttgttctgggacagagattggccatggcatccctcgaccccgctttcagctcactgcnnngaggggaccttcctncacccagactggggggctc

SEQ ID NO: 10327 - DNA, 629 bp, Canis familiaris
  misc_feature (1)..(629): n = a or c or g or t
acttcttngtagtcatactaantaacantagtaaggtgcnnactatnnnntagatgctatacatatattatctcaacccacactcactcatctctaagggagacacattactctcattttatatcaggttcaggaaacactgagcaatgttcccaaggtcacaagtgacacaggtaaatctagaagcccagttctgacccttaagaagggtgctaagtcaaccccaggctccagatcttcctctattggatctcaccatgtctcattcccttcctggagaaatattaatgtacacgtgagttgtttcctcattcagacaataaacttgttagcacagaccttttagagacacagtgtcatctctggacacagagatacctggctcgttcactgcaggctgttgaagacatagccttgtccaagttggtctgacttcagtagtctcaaaacacatccagtcctccctacctaatcactcacacaaactccttaaataaagatcaacaggaaagtttactggtagcattaggtgcctactatgacagacaggacaagacagcctcactcaagggacaatgaaactagcattctatcagactgcactgttctgaaccttgtcatggttctaa

SEQ ID NO: 10328 - DNA, 649 bp, Canis familiaris
  misc_feature (1)..(649): n = a or c or g or t
gtaagctatannattttatgaagagcagnnnaggcacagataannnngctagagaaggcatctctgaacaggtgatcttnnnnnnnnnnnntgnnagntaaatgcaaaaaccannntaaaacatttgcaggatcaatcagtattgatttgacattcaggtattgatgctgtattaatcttgnngcatgagaatcacaaacactcacaggcccccaacctggaggcactaatattttctgaggctatcaggaatcatgtctccagtgattcttgaggaaccagatagaattctaatgttaacattacatcctaagtaacagtgatataaagaatcatgaatcagagaaaccccaggttcccatctcagtgccaccgttgatgtcactgtgtagcactaatcaggcagggtcatctttgtgccctccatttatgtcacctgcagaattgttgtttccaagtgcatcaactctaaggattcttcttctgtctcttgatctttcaggaatttgtgctacagatagtcactaataataattgatttagagtctaacctttacatttttagtacccactacatctcccaaaaatggacagtgaagttaaatcactgnnagttttatgatagannnnngtatgttcattgtatatg

SEQ ID NO: 10329 - DNA, 600 bp, Canis familiaris
  misc_feature (1)..(600): n = a or c or g or t
gatgccatctgtacctgtcacacgtttcccggcagatatttcttttcctgcatcccaaataatttggggtatgaagtaccacgggaaaatgagtgtctccaggatttctttgttttttttttcccctctctcaaaggtttttgtatttcataaatcttcataagttgagaatgctgggtttggtatattttggtaaatttatatttttatcaggtaggtatttgcatcatacatgggtttttaaagaatcaagtcattgtaaaaggcagcctttgctcctgagctcagctgccaggggtccccagggacctcccgtcattggctgtggtttgctcgccctcccgagccatagctgcaggcttcatcgttagtcctgaggtcctgagcctgggcactacgaggtgcacctgtgagctgcatgctgctgttctgtggtgtcagtccccccacctgggtcgccttgtgccatgtggtgtgtggtggtgagagcagggcctgtggnnnggaaccacaggagctgctgctggcacctgccctccactaaccctcgccctgtcccccatgtgtctggaggtttgagaaatgaacgtgctagccata

SEQ ID NO: 10330 - DNA, 546 bp, Canis familiaris
  misc_feature (1)..(546): n = a or c or g or t
cagtnnnnnnnnnctgcactttggtgattccttttcctcagannnnncctgagtgctcactnanncactaccccctcagactccctgtgtgaggcctgtagaggccctgaatgcacaaatggggaaaccaaggcacagagaggctctcctctcctctcctctccccctatgtcccctcaaaaaagaaaaaaaaaagaaaaaaaagaataaccagtacttccattaggcctcggctgagtgaggagggaaagcccagcactgctgccctcccgggtaaacccactccaaggccttggcccacctcgggcttggtaaccacacgggggcttcctccaagccccactcttccagcacttccaccggcagagtcccagagctgcttcaccctgggggtgtgctttgacccccagtcagctctgctcaggacctgctctatttcagggaagaagatttatgtattatatgtggctatatttcctaaagcacctgtgtttttctcttnctaagccagggtcctgtctggatgacttacggggagggggggga

SEQ ID NO: 10331 - DNA, 671 bp, Canis familiaris
  misc_feature (1)..(671): n = a or c or g or t
ttccagtctntggctcatgagccggagattgaaatcgannnaaactgttgacactttcatctttgcaaaactgtattaatagtctactatttctgcgtgtatgtgtgtgtgtgtaagtctatagaggnnnaaaacttgcangaacatttgagtttttcaagcctctccgtgtaacttggtgattatagcaactacccttatttttatatctgtagttgattttaggcatgacaagagtgcacagctatgaaaattaggctttgaatgtagctgaatctgctttccaaattaggcttttccatttctttttctccatcatcatcagcaaccttatcccttctctctctttcttttctaccctgttcaggaactggccaagtacttcttggcagagctgctgtctgaacccaaccagacagagaatgatgccctggaacctgaagatttgtcccaggctgctgagcaggatgaaatgaggctggaactgcagagatctgctaactcaaaccccgccatggcaccccgagaacgcaaagctggctgcaagaatttcttctggaagactttcacatcctgttagctttattaattattgttgtccatataagacctctgattcctttcctccaaacctnnnnccacttccctaatcnnnnaatcctcagcaagac

SEQ ID NO: 10332 - DNA, 318 bp, Canis familiaris
  misc_feature (1)..(318): n = a or c or g or t
agtatnataagtacagcaaggagaannnaatanngtggcttnnaaaaaaggttcagcannncgtgtcggccttanannnnnnnaatgtgaacgtcagcgcccgggtacaggcaactgcatttttctctggtgacccgttttccagtgacaaggaagaggattatgtttgctatgcccatggtnngatatctgattacatccctaaagaattaagtgatgacttagcaaaatatttaaagcttccagaaccttcagttccattgcnnagccctccatcaaagaaagtaaaggtatcngatgagcccatagaagcaaaag

SEQ ID NO: 10333 - DNA, 566 bp, Canis familiaris
catccacatcaatttaaatgttgctctttatttgcttctgaatcttgctgaagatacacgtacagaactgaagatgaggaacaagaacatagttcacatgctggtgaaggctcttgatcgggacaattttgagctacttatcctagttgtgtcattcttgaagaaactcagcatctttatggagaataaaaatgatatggtggaaatggacatcgttgagaaactggtaaaaatgataccttgtgaacatgaagatctgctgaatatcaccctccggcttttactaaacttatcctttgacacaggactgaggaataagatggtacaagttggactgctccccaagctcactgcactcctagttccaccttttcattccacttgcaagccatggaagcaatggcagtcatacataataaacaaaagagaaatctactgatattccaagatcaagataagggagaagatgtacatattgaagaggaattaaaatatactacagagcagtgccttcaacttctttaaaatacttcaaaatgtctatcaatgatgggatgagcactggg

SEQ ID NO: 10334 - DNA, 321 bp, Canis familiaris
  misc_feature (1)..(321): n = a or c or g or t
tctccacnngaattgtattgatatgtganncatgtgtgtaattnnntatnnnnaatatatacatatacccatatgtatatacagaaaattatttttaatattttcctactgataaatttaaaattggaaattttgtgagttttttccttgtccaatagggcctaatttttttctttttttagtgatttaacaatttnngggctgcacctttaaattcccagattgtcattagacgtgtacagtatatgggataaggtggacacaagtgcacatataaataaaatcttagactattttattcatttatggtaggagagtatc

SEQ ID NO: 10335 - DNA, 693 bp, Canis familiaris
  misc_feature (1)..(693): n = a or c or g or t
ttgagcattttgtgttttaggnnacntccggttttgaatgnctcggacaagctgtgtatccgtctgtgcgagtctgcacgtgcttgcgtacaggcaccggccagccagccactcaggtggtttttacggactcacagactttttatttaacgtctccgtctgtgtcactttctgtgacctgcgaaagtcaggctgtgtgttctgtggatttggggagcatttgcaagcggccactgaacccacgcttttagccattgaaaccagacatatggaggctcactgacaaaggcacatggttctcccagagctcagcccacccgctctgtaggacactgcacggctgccttgagaccccaatctcgctctctggacatccccaggccttcccctccgtccctgaaggcggtggctgggctgaagtacgtgaaccagatggtggcttttcctcgttctgttaaccacaaccctactgaacatctggctggtgcctctggcttgtcctctcatgagccccgggcactcggtgctggctgctgtgggtgctgtggctggagctacgtcctgttacctgtcaccctgtagcctgacggctcaaccctgtgttgaaccctgtgtgaagtgcacagatgtgttgaacttaccttgggaaaccagacctccttggtctctgctgccagccatccctttgacaaa

SEQ ID NO: 10336 - DNA, 343 bp, Canis familiaris
  misc_feature (1)..(343): n = a or c or g or t
ctccagggagtgtnngatacctttatcaatgaatgtgtcaacctttctggcatacgaccagcccacaataagttactgtggggtgcatcatgaacttctctctcataagtccnnngaaacgaatgcacaggaagatacgatggaaacacacctagagactgaggtggatctgagcacaatcacaacagctggccaaatcagtgaccataaacagcagctggcttaactgagctaatcagtagcccagggttgccacccaactttnnncctccaggacaaaatgaggaagatttgttcattgtggactctaacagcaaaacacaacaaaaatcccctgtgaaac

SEQ ID NO: 10337 - DNA, 505 bp, Canis familiaris
  misc_feature (1)..(505): n = a or c or g or t
caacttcatgaacttcttgctttgaaagaacaagaacannnnnaagaacttgaaanaannnagtttttcagtgatgccgagttcnannnnnnnnnngctaaagaagtagctaaagaagagagaaagcatgaanangatataaaagaataccaagaaaaaattaagcaacttgctcttgctctgactgaaattcagcaagaaatgtgatagttctgagaaggaatttaattgaaatggaannnnagannnattgtaaaaattattaaatattgtaatagtagtaactgctatgactttgaaatgcctctttctacacatttcattctgattatattttaaaagacttttgatgaagtattttttaattgtatatgtaggtttttataataaattgttaattatgtgttttagaaaaacctatcaaaataactagacttacaacactttcttgtttctgtgctatacattgtttggtaattacacatttgcgttcaaatatgtaann

SEQ ID NO: 10338 - DNA, 440 bp, Canis familiaris
  misc_feature (1)..(440): n = a or c or g or t
ttacgtttttttnctttnnnnntnnngtccttgtcnnnnntccattgtttaancnnncatgggccaggngnnngcttnnannnngnnngcagggnnnnnnngcactnnggtcagcaggctnnnnnnnnnngagttannnnnngcttcnannncatannnctgnnttnntccagtnttcagcactcttgnnnnctcttcagtncnnncaagnnnnngaatcaaaaagtgtttttcaatacccatgatttctccctgtnnngcagccagccctgatannncttgttannacctgtcaccacatcccccnngtgtnntcctccagccaagttnnnngacctgnnnnnncaagacccnntaatncagnnnagnngcatgnannnnnnaatggnnagagtccnnnntngccannnnnncnnngtctnnnagtacccttctccctt

SEQ ID NO: 10339 - DNA, 536 bp, Canis familiaris
aagactgcgccgttctcacttattccccacctccaagactccctagtccgagattgtccttcaaaatagaaggaaattagaattattcttcttacaacaaagggttgggggagttatgtgctgcctttaatgtaaatgaaagcgagaaaagcaacaaggttggtgagaatcctggtttaatcattcccctggctcactctgagagcaacctggacccatgactgggtcctgcataggatcctctgaaaaaggggggaatgtgggacccaggaaatttaacaaaatcccctacccctggacaagcagagcaggactgactctattttgggctgcacccgccttgtgctgacctgcttattacttagggtacttccccgccctaatcaaagaccaggacacaccctaatctgaaatccagctcagtggacagcatgactgtgcaactttctgcgtatcccattggccactggcccctataaagttgctaagcctcttagtctcggggtccaagtccctgctccactgcgtggggtata

SEQ ID NO: 10340 - DNA, 618 bp, Canis familiaris
  misc_feature (1)..(618): n = a or c or g or t
catcatcgacttcatactggagagaaaccatatgaatgtagtttttgtgggaaagccttcagccagannacacatcttaancagcatgagagaactcatacaggagaaaaaccttataaatgtaatgaatgtgacaaagcctttagccagagtgcacaccttaatcaacataggaaaatccatactcgggagaaattatgtgaatacagtaaatgtgagaaacccttaggtcccagtccttcacttacccagcagtagcacataacttatggtggaaaaatcatatgaatatataaatgtatgaaaactaggtcagatctttttatccaattcaatatcattattcacagaggaaaaaaaagcttataaaaaacttttaatgcattgaaactaaaataaatttaggtcttaaattagtagcatattcccaggagaggatatatagtgaaaataatttattttataagtaagattatattaagaatcatgttccaaatctgaaatcaaacttttttttaatgcctagaaaccttgtaggcaataatctgtaattattcacctgtaacttttatgatacaaagttttttaaaaattatgtaagctttaaggcagtgatgc

SEQ ID NO: 10341 - DNA, 524 bp, Canis familiaris
  misc_feature (1)..(524): n = a or c or g or t
ccatcagnngccactcatcnnngnngaatcnnctnnacagtccacagatccggaagacagtgacagcannaaggtcaaagagcttcaataaccatcggcntgtggatcccgaggtcattgcacaggatattgaggcaactatgaactctgccctgaatgagctgcgtgagctagagcggcagagcagtgtcaagcacacccccgatgtggnnctggacaccttggagcccctcaagacctccccagtggtggcccccacatcggagccctccagccccctgcacacccagctcctcaaggaccccgagcccgccttccagcgcagtgccagtactgcaggggacatcgcctgcgccttccggcctgtcaagtctgtcaagatggccgcccctgttaagccgccagctacacgacccaagcccaccgtcttccccaaaacaaatgccactagccctggtgtcaactcctcatcttccccacagtccactgacaagtcttgtactgtctgaaggatataatttaat

SEQ ID NO: 10342 - DNA, 611 bp, Canis familiaris
  misc_feature (1)..(611): n = a or c or g or t
agtggnnagccccattattgctgattgccatggacatcagtagnctctggttnaggatgattattcttccttctaggtnnnactaggatgtcataaggcatttttttttaagtaccctcaatattgcaaaaacaatattttggaacaatttcttactctagatgcgcttgaaaggtccacagagatgaatggcagtaataacaatgtaccatgtattgccagatatttaaaaggaatctccatccaggaggctgttaaatcttggccactcaatgaagctctgatggacgcacagcggaggtcccctcctgtcctgggacagtgctgcctgggtggccaccacctccgcaaagtggggggaccgcaggagcaggcaaaggagcagactggtcaccctggcccccagacgctgctcagtgggtggtggggggcatctagagcaccccaggagctcccttcctcacaaggttttacgtagaagccgtgttctcggtgctagtgatctttagagtctcctgtgatttcggaaatcacagaaaacttgtccgatacagctatgcttcattttacctggacacaccatgtttttgaagagaaattttgttattgaa

SEQ ID NO: 10343 - DNA, 624 bp, Canis familiaris
  misc_feature (1)..(624): n = a or c or g or t
gagaaatgacctgcatacaatgctgatttctgttcctgnnnnngctctagaaaagccatagaaagccatagaatgctcaaactactctgagggnctcagtacaggaaacccagagctaactcctctctaggtacaagacaaagtccattgtaattactcatgaccaaaggacatcatatggtacctagggagaatgacatccaggaactggccttatacgaccacctaagtcttggtattgccagaagctggcctggcacccacaattagaccctggtgttctcttgttgagcataaacaatatcagagaacatccacatcagcaagtccattcagtgaccatgacggatcagttaagacaactagtaatcatatctgaacatggaagacatgaacaccgtcaaagacaccaacttaccaacttatggcagttaatacatgtgactgctctttatttacctaccagttaacagagcacagagctgtgttctcatcttctaagtaagaattaagatgcccatcacagatttatccttgcttcctgatatcaccttaacccacaggatgaagaaggtcaagactgaacacaagataacctctgttttaagattctcacgctggctc

SEQ ID NO: 10344 - DNA, 343 bp, Canis familiaris
  misc_feature (1)..(343): n = a or c or g or t
cagttggttgacagacgcaannnatcnnnnnnatccaaannnngtaataannnncatannnaataannnngatttnnaggnnnannnnnntgtnncatatgaagaanncaaacagtntgctgaagaaaatggcttattgttccttgaagcaagtgcaaaaacgggggagaatgtagaagatgctttcctggaggctgccaagaagatctatcagaacattcaggacggaagcctggatctgaatgccgccgagtctggnnnnnaannnaaaccttcagccccanagggnnnnnggctaancnnnganccccaaccccagagagaaggctgtggctgctagtga

SEQ ID NO: 10345 - DNA, 122 bp, Canis familiaris
aaataaatacagtctttaaaaaaagacttgtacgggacgcccgggtggctcagtggttgagcgtctgtctgccttcagctcaagacgggatcctgggatcctgggatcgagtcccacatcgg

SEQ ID NO: 10346 - DNA, 440 bp, Canis familiaris
  misc_feature (1)..(440): n = a or c or g or t
tnntatagcacatgagcctagaaaggattttctgctcttgtgtgttcactgtaacaggacaggacaaggagatcagacgaccccagaaccctcttccatatccagtgttggactattaattttttatgctgttactggtattgttggttaacaatgtagttaaagggggaaggctccantgcatcctttggctaaggactgagggtgcttgctggtttgtaatatctaaatacttgaggttttttttttttgttttgttttgttgtttttaaaaaaattcttcagggagagaaaagggatggtttctgaggggttctgaaaagtatggttgaatgtgcaacatacaggtaggttgtcagcataagctgaaatgtacgcatgtgagaacttgttgtcccccatccccccacacacactttttctttaactatactcttttt

SEQ ID NO: 10347 - DNA, 423 bp, Canis familiaris
aaaggtgcagccatactctgcagcctttccctgtgaaggattgcctggcgctggtacctggccacttcttaagaagtgctgtcattcctactgagataaatgctcctttaaaaatagtctctgtggcaggtcattgggggataatgtacaacattcctggccaggcacttctttttcatttcgtgttctactctgagaaattcccggtggcatccttgcagcgtggaaggatgaagctctccttcattgagcaaagctgttcatggttcatgatgtattttatgatgcctgttttgggagtagttacttttaacaggctcaactgtgttgtgtcatctcttgatgctgatttttgaccttctgttttattggaaataattagtgacaggggtgtgcctatttgtgaagtttatagcacatgta

SEQ ID NO: 10348 - DNA, 596 bp, Canis familiaris
  misc_feature (1)..(596): n = a or c or g or t
caagacggagaacctnnagtagagatgaagtcatgggagataatctgctgctgtcatccgtctttcagttttctaggaagataagacagtctatagataaaacagctggaaagatcagaatattatttaaagataaggatcggaactgggatgaaatagaaagcaagttaagagctgagagtgaagtccctattgtgaaaacctcaagcatggagatttcttctatattacaggagctaaaaagagttgaaaagcagctacaagcaatcaatgcgatgattgacccagatggaactctggaggctttgaacaacatgggattccccagtgctatcttgccatctccaccaaaacagaagtctcccgtgaataaccacagcagcccgggtcagacaccgacactttgcccgccagaagctagggttccccatcctgctgctatctcagtgtcagctgaatttgagaatgccgagtctgaggctgatttcagtatccatttcaataggttcaaccctgatggggaagaggaagacgttacagtacatgagtgactttctctcgatgtttaaaaaccagtacctgtggatgactaggaa

SEQ ID NO: 10349 - DNA, 600 bp, Canis familiaris
  misc_feature (1)..(600): n = a or c or g or t
gtaagtaaacttcccttcttaaattttttaataagcaccatgtggttgctnnnnagaatgagaatgtnaagaaatgttgttgagtgtttggagttttattatattcggggattttgttttgtaaccaaggtgctttttaagatattcaaacatctaacattgattaaacttttgaaaacatcatttgcaaagtctacatctaatgtcaaaaagtaaatgtacttatttttgttccattcttatgtactattttctttttccttctacaggctttttcatttatatttcttgaaaaagttcttactcttgctttccccatcatccctcccccagtttcttttatttaaagttttgagaatttctggagctgtgtaagacaacaattacagtgttgaaaaaaagcataatatgctttacaacttgtacaaaccgatggcagccaaatgtcatttgctttcagtgagaggctccagtatcttcacagtgaaaaatactttgtacttctttgctctcaatttgattgtagcacattaatactaatatgccttgtttaaatatactttgtgcatagtttaattttttaaaagttgtctctaataa

SEQ ID NO: 10350 - DNA, 21 bp, Canis familiaris
  misc_feature (1)..(21): n = a or c or g or t
ggagccccggtgccnncggcc

SEQ ID NO: 10351 - DNA, 535 bp, Canis familiaris
  misc_feature (1)..(535): n = a or c or g or t
tnngtgaatcnntgaaagaatcagtctgnctcttttcagtgctatacaactgagcagatatccagctcggatacaggttgaagggccacaggcttctacctnnagggctcagctcccattaattcataagagactctggacatgccagggtgtattatggagtgatggcatttagaagagggggaggaaggcctgaacactgtaagtaatctatgattgggttggaaaacaaggttgaagttactcattagcaggtgaaagggtcaagggtcannnnnngggggctggaagcagagtggactannnnnnnnngggtggggnnnagcagttaaggcaccagccacttcnnnnnnnnnnnnagctccctgctacctgaagatgttccaccaagtatgggcagctctgctctatctctttggtattctccttaactccatctaccagtgccctgagtacagtcaactgacaactcagggagtggatgggaaagaggtatggactgagaatggggaaagctgatggtgggagctctgag

SEQ ID NO: 10352 - DNA, 371 bp, Canis familiaris
  misc_feature (1)..(371): n = a or c or g or t
taacacacctnnntaatgtacgacctgagagcctacaggtctaaaagagataaatatgatctggaggatgatcttaaaaataatcataattaaagtataaaaattgcctccagactggccagaaaaataccctatgatctgagagagactgccaaacattctgtaatgttgagttcatcanatgttttgtcaccaaaaacccaagtatggccttaaagtgcttctttnnngactcaaagagaaaaatgcatcctattttaacctccaagtctcatagggtgaaacagttatttctgcagtttggtnnnnnncattacttgagaatctgccaacnnnnnnnacttcactgtataantcagtcacttggaaag

SEQ ID NO: 10353 - DNA, 484 bp, Canis familiaris
  misc_feature (1)..(484): n = a or c or g or t
ttctgacgcggttcacgagcacgtcccaccactggatcggcctcacggacgggggccatgagggcgtctggcgctgggcagacggnacaccgttcagtgctggccggagccctgcgttttggggcagccatcagccagacaactggcagcacgaggacggccggacggaggactgcgtccacatgcagcacaagtggaacgacatgctctgcgacaccccctatcactgggtgtgcaagaagcccaccggccaacgcgtggcctgagacgggccaggagggagagccgcggccactgccagccctgggcccccccccatgccctgtggagaccgctgcgcccagcccgctccccggggctccccgttcggctctctgtgtcccctgctcgccctttcatttagccctgcacacccgctaacgtcgcgtgacccggggggccccagggctcctccaggccaagggcttgctgtgcccccgcgtcc

SEQ ID NO: 10354 - DNA, 38 bp, Canis familiaris
  misc_feature (1)..(38): n = a or c or g or t
anttaacattctatggaaaggtagagggtgctttctgg

SEQ ID NO: 10355 - DNA, 512 bp, Canis familiaris
  misc_feature (1)..(512): n = a or c or g or t
gtnngtccatcagaaggtacgtgagtcatcactgnnntctggttttatgcatttgtagactatgcagcttttcatcagactgcaaatgtatataagagggatctcaaattagtcctgagtgtttaaatccaccactggaagagtaaataatccatctaccttttcagtggaaaattatgtgctattgagtaatttttagctctttttaaaaaattgatgaaattaacagtgtcatgtttatgagaaagtcacatgaagaaatctgaaaggaaggaatctcatgtagtcatccaggaacctatgattgttgtttagtttgttccagcattgtctgggttccagactggatctactgttggatcactcgagcgtactaatggactcgttgaaatgagtccaagctgcagtccatgagcaataacagactaccccggatactgctatttactcagtgcttagtaaatgagatctgtggaaaacaaacnaagtgattagttacttaggacttttta

SEQ ID NO: 10356 - DNA, 646 bp, Canis familiaris
  misc_feature (1)..(646): n = a or c or g or t
annatagcaattaagnncagaaatacatctatataaagcttnnngctgtannnnagtacttttatttgactcagtaagnnnnnnaaccccctagtggtaatcagcatttcttggaatagggctacaccgcgtctcacattaaatatctggagaaaactgaagcttgtttttcgttatattggttcatcagttggtcgaggctgggaagtaatagttgataattaattttagattataaggttttggctattaatgaaaaacttccttgattgctatgtgtcaggcatacacttgttggtgcatttacaaagagtacaataacagaagaaaataaagtgaatactggtcttgtgagtcccatgaacctatggatacacctttgtgaaaagatagtcccactactataaaactgggacatttaatgtaaaatgttaatttgaataaattgtaaaagaatcataaaaacaattttaaaagaattcaaattttacgtttaagtacaaatagttcccatactgcaagtatttgacttataaatactgcctttactctttgttttgcaagtgcaagtgacaactgcattacttcactcttgtgaaacggtggtaggggagattccatgcctgttgcatgacaagttgtaatt

SEQ ID NO: 10357 - DNA, 369 bp, Canis familiaris
  misc_feature (1)..(369): n = a or c or g or t
cccaatgtagtctgaaaggtgnttttcagacacatgcatctgcagtgtttatgtcgnnnnctgctcattntaatttcatgttcnctnnntagattgtactttagagaaggatgacagacctttgagtggcatgatggggatgctcagggagacaagcctgcagttggaactttacctttaatgcacgtggtgctctgtggcagctcatgctttgggttaaaatannnnnatgtctttttaaagtgaagggaaggaaaaataagaggaaatcagcaagggaaacaaccacagaagactctaattgtagaaaacaaacaggatcactggagggaaggtgggttggggatgggggtaactgggtgatgggca

SEQ ID NO: 10358 - DNA, 523 bp, Canis familiaris
  misc_feature (1)..(523): n = a or c or g or t
aggtattngctggtcactatngtagtcagaatatctactccagattattgttaatagttcaagtatatcgtttattaaatacttcctttatgtattgaagctttgactttgcaagaagattgctttttttccaaacaaaaagatgtctcaggtttgttttgtgggttatctgaaagctttttttttttctttttttcctctgaaagctttcatgtctcagaacttagccttcacctgtgaaatgctattacggccttaatatgtccttattagatctatattagatcaaatagttgcatagcatttatattaattttatattttttagctatgacacactgtgatactctggtagatgcttatagctcaatgataattttttatttaatcttttcttatttttgtattttatcatgtgtgcttttaatatgtacagaacaactataatacatagttgtaactgaaatacatttcagaggcacagcgttaacatnnnccttttactgtttgatannncagatta

SEQ ID NO: 10359 - DNA, 608 bp, Canis familiaris
  misc_feature (1)..(608): n = a or c or g or t
tgctggagacannnangatganncagctggtgctcannannagctgctgccgggggtggatgtactcctnnaggtgttccctacctgttcagtggagcaggcccagtgggtgctggccaaagctcgaggagatttggaagaagccgtgcagatgcttgtagaggggaaggaggaggggcctccagcctgggatggccccaaccaggacctgcccaggcgactcagaggcccccaaaaggatgaactgaagtccttcatcctgcagaagtacatgatggtggatagcgcagaggatcagaagattcatcggcccatggctcccagggaggcccccaagaagctgatccggtacatcgacaaccaagtagtaagcaccaaaggggagcgattcaaagatgtgcggaatcctgaggctgaggagatgaaggccacatacatcaacctcaagccagccagaaagtaccgcttccactaaggcattcaccagactctgcccgagccttctaggctcagatcccagagggatgcaggagccctacacccccacacagggcccgccctaactcctgtcccccttctccactctgnnnnccaatttcttgccccac

SEQ ID NO: 10360 - DNA, 523 bp, Canis familiaris
aaaaatgctttggatacgatgcacaccatgggacagagatcccagaaatggggctagttgtggatggggcaacatgtggcccaggaaaatactgcttgaatcagaattgtactttttatcaagacatgggttttgactgtgatgtgagtacatgcaatttcagaggggtgtgtaacagcaagaaacactgtcactgtatgagaggttggaaacccccaacatgtgaagagaaaggagcaggtggtagtatagatagtggccctccaccggacagagaatatgttctaagaggcaaagtaactgttagtgtaaacagggcactaggtttaatagtgattcgtacattacttttcctgactgggttaatcattggactctttttccaattaaaaaaaaggtactgaggagcacaaaacataaaccttcgaagcatcaatatttcagttagttaataccagtgatatgcacaaaatggacaaaataacattgaccactggaaaaatgatcaataaagactcttata

SEQ ID NO: 10361 - DNA, 410 bp, Canis familiaris
  misc_feature (1)..(410): n = a or c or g or t
ccacacgtgagtgggtgtnnggagaacacaaaagggtatccgcatgaagggtcctgtgtgnnnanatnnnaggatccagtattactgccntctcaagtaaccaacacacaggcccaggaggggtgatagtcatttattggactgaagctgcttgtagtactttaactgaggaacannnnnaacaccctaccagtagaacagtggctcagatcctactcactcctgcttatgaaatattcccaatcactggtcatctgaccctacttgaacactcctaggcagtcatattttaaaaaaaatcttcctttatatcaagtcagagtatacttctataaatttcaccatgggtaataggaaatctagtcatttttccctgtgattgcccttttaagtatatttaaaannagcta

SEQ ID NO: 10362 - DNA, 505 bp, Canis familiaris
  misc_feature (1)..(505): n = a or c or g or t
tgagannatnnactgcaggcagtgcannntgagccggggcttgtggctgcgctctacccaaagccctgccgagcttacatgcacagggatgtagatgtcatagctgttccccgagtccacgtccacagcatggaagccggcactggagccatagatgaccttgagccgctgaccctcctccacagtcaggtcaaccagcagaggacggctacaggcagcggacggagcatctggggtccccagcctgtgccccgcgcacctgagatggtgatgagcaagttgagcccttctaggacatccatttgctggaagcgccgccgcccgatgagcccatacaccttgccctgcccgctccggtccagtagcatcaggccattctctgtgcccaccagcaggttgacacctgcagcgggagcccctgggcgggtcactggtggccagccctcgcccgactgggggcccaggggtgccagcagaccctgctctccctccctggccctggctc

SEQ ID NO: 10363 - DNA, 573 bp, Canis familiaris
  misc_feature (1)..(564): n = a or c or g or t
ggggatgaagactgcagatacccnncgngtactttcaggacannnnatgcagacacgctgaaatgagtgaactgagtgtggtccagaagccagaaaaacttcnnnagcgttgcaagtactggnctgcctgtaaaaatggggatgagtgtgcttaccatcatcctgtttcaccttgcaaagccttccccaattgtaaatttgctgaaaaatgtttatttgttcatccaaattgtaaatacgatgcaaaatgtactaaaccagattgtcccttcactcatatgagtagaagaattccagtactgcctccaaaaccagcaatcgcaacaccagcaccaccttctagtagtcaactgtgccgttatttccctgcttgtaagaaaatggaatgtcccttctatcatccaaaacactgcagatttaacactcagtgtacaagacctgactgcacattttatcatcccaccattactgtgccaccacgacatgccttgaaatggattcgacctcaaaccagtgaatgacactcagtcctccttggcagaagattgtggagtttccatctactgacgaaaa

SEQ ID NO: 10364 - DNA, 528 bp, Canis familiaris
  misc_feature (1)..(528): n = a or c or g or t
ccacnnnnnncaacnnnnnntatgttttctacatgtcaagcttcttcctcatatcagctgccctcttcatgggtggcagcttctgtgccctgcagaagaaagagaggcaaagcaagcaggccgaggcggaaggagccatcacggaggctgcctcagagcagggcctcacggtagaggactcacgtgggtccaggaagcagctgtataccgagatcatgtatgtgaccagtgtctgagccctgaggtcagtgagggaccactgcctcagtccaggagtgtgatgtccagctgccaggggccagggtgagggactggcccaggaagcctgaaacacaaagccgtccaggctctgcacactggaactcagccaggagctgggaccttagaggctggcctccaaagactcagggttcctcccaaccagcagaatccaggagcgggtcctcctgactttttcttttgggtaccagagtacctggagcccagaaaagtgagtctataccctacacagagccggctcacctcagc

SEQ ID NO: 10365 - DNA, 571 bp, Canis familiaris
  misc_feature (1)..(571): n = a or c or g or t
aaaatgcgnnacctgctgcatatnntgaaggtngacttggnctgcacatccagagaaaactcagtaaagctggatgatcttgatatgctggatttacatgattttgaacaggctgagaattcaaaagaaaatgaatttagaaataaacacgacaccacaattcaacaggaacgtcaagaataccaaaaagctttggatatgttattgtctataccaaaggatgagaatgagagactctcttcaccaaatgaatttttcttacccgtctataaatcaaagtattcagaaggggtcataattcagcaagtgaatgatgaaacaaatcttggaccttcttcctgggatgaaaaaaatccaagtgtctcagacagcttaacagaccaagagacctctgtgaacgtcattgaaggggacagtgacagtgaaaaggtggagccttcgaatgaattatgttgtcttagcacagaactctccccagctcttcagtttcacagtgttcaaggtgacaacagtcataacatggaaggaccaactcttaaaatcatggaaatgagcattgaggactgacctt

SEQ ID NO: 10366 - DNA, 411 bp, Canis familiaris
  misc_feature (1)..(411): n = a or c or g or t
gtactgaggttttggtgaaatcctttcttcctctttcggtcttctgcccctctaacgtgtggtttattgagaagaaccacctccggcttgactaagggatccctaggtgtgcccctttcctagagaaaaccattggagttgggggcgctccatcctgcactatgcaaaagacgtctccatgcctcatgcctcatccctcatcccttaagagtagctaagtagtgatcttgactacatcctgggtcagtggatacaagctagaaggagctaatagnnnnnnnnnaannncngaaaaaaaaaattttttttttttaatgatgactgagcagcctgctatgcagcccatgatcacatcacaatctgtctctccttggagttctggactgccttcccagagggagggcagagagg

SEQ ID NO: 10367 - DNA, 584 bp, Canis familiaris
  misc_feature (1)..(584): n = a or c or g or t
caatgggnnntccaagataacanngcgaaaggatagaaaatcctacntgcactgagactggtataccatcctacagagatgcacagacatcccccactgcagtgcctccttctgtaaaaatgaacagaaaagcaaatcaggactcatgatggtatcagaggtccaaagggaggggcctgaggagtgagtacaggacctttcataaatagttgtcccacaagaaatagaataaaacttcaaacagaattctctgaaatttgttccatggaaaactggctgctcctgatagtaagaggcgttaagagaaactgaggcttgggaacactgagctaagtaaggtacaacacaggctgtttcatcgaggacttcctggattgtgttgatgaacnnnnnctccctaaaggagggatacaatatgccagtttcctgagcggtatgaaggactagtgttccagcttcagctaataaatatacacaaacagaaaagacatttaattcaaacatctgcaaggaagtgactggaactcatgacattctaggacaaggaaaacctcagagacactnnnnnnnaatcctctttggcc

SEQ ID NO: 10368 - DNA, 595 bp, Canis familiaris
  misc_feature (1)..(595): n = a or c or g or t
tgaagaggaattgaagacnnnaaaacgtaaaatgaacctgagaattcaagagggagacacacaaggaaggttgtgaagtagtcataaatgaatgaagaatgtttgggagtgagacagcatgtctggtaaacttttcatggtgactttatctttggcaaactgctgtgatgttcccttggtcttgcctaactgcaacttgctctgtagctaaggagacaactgtctcaggagaagcacctaagggaatctcttgagaaatctggatcagccatgctattcaaaatacaagagatggaatcaacagtggaggtggaacggaaacaggtgcaaattttgcagcaaaactgtattggcctgcgcagttctatgcagaccacccaagaactactggcacaagaacagcagagaaaaggagagttggagacttctatctcacagctcaagtctgatctaagtatgaaaatagatgttagaaattacacttctgttaggtttttttgagattttgtgaaaaaactctttagatctgaaattcttgaagaggccacaaggccaaatgtaaaaacttgttgatgtctcttttgtctgtggcact

SEQ ID NO: 10369 - DNA, 294 bp, Canis familiaris
  misc_feature (1)..(294): n = a or c or g or t
acattttttttaaaagtnngttgaaaagaatattgtcttattctataaaacatttcaaacctagttagatatttnnnnnnaaaaaacatttgcgcagaannnagcacttaggnntgcctgtcctatatcctgcagttggacaggaaaagaactgaaaatgtcaccctnctgacccataaggcagctggactggcagccaaggaagggagagtgatgaggtggtgcggagagggtgggcacgcatgtgagnnnnntctctccagagcaggcaggagtggggacagagggagagct

SEQ ID NO: 10370 - DNA, 640 bp, Canis familiaris
  misc_feature (1)..(640): n = a or c or g or t
tcactcctgcccgcctgtccacattccttnnngctcctccccaggtgaccccaagactccatcactacagcctcagctgctacagccttaagtctcagacatgtccatctttccaagggctcaagaccttctctgtcgataatggggatgtgacagagacgacgctgacaatacctttgagggcaagagcgccttgttttcattctccattgctgcccgaaacatccacttgcagccacagaattaaaaaaaactgagtttcccagtgcagaaaggctcatgctcactccctcacccattcccacctgcctcacccgtcctcttccttcctggggtccactaagccagagaaccagcagcgcataaaggccgagagtgacctcagtccccagtcctggtggcgctgaggagtggagagctggcccacagatggggctggcgggtgggcctccttcccacactccacaccagctgatcttttgctgctgccccaaacttatcactactcccccgcagcactgcactgggtcacaggacaccgggccaaagagagtcttctttttgtccttcacagtcttcttcatagtattgggctttgtacttagaaataaacattttcatactattttcacttnnnnnn

SEQ ID NO: 10371 - DNA, 551 bp, Canis familiaris
  misc_feature (1)..(551): n = a or c or g or t
agataaacgagccnagcagcccccactnnnnncagcgagactacnnngaagacccagggagcgacnnnnacgcaaaggacaccatgagcccggacgtcntagctaagaaactggccgccagcgggacctcgcgatggagccgtcaggtgggggagcccgacagtgatggagcacacagtagcaagacctttttcgacgcgcaggaaaagcagcggcagttcgaaatgaaaaggaaactacaccacaacgaaggcctgaacatccagctggccagacgactcatctccaacgacctgcagcacgagaaagacgaggatgacaacggaggagcaccacgtggtgccagcgaacacagcaccggcctggaagagtcctcggatgaagtttctacaagcgacgaaccgcaaagccagccgtcccacagctagctgaccgtcgctccgccccgccgccgctggccgcctaccgccgacccggtggccgcgacgcagcgctgctcgttgtcaagtccgggccgcaagggccgggacgcccggcagtccacctgcccc

SEQ ID NO: 10372 - DNA, 480 bp, Canis familiaris
  misc_feature (1)..(480): n = a or c or g or t
tgtgcactccgagcaggtctttgccctgcgacttcaagacaagaagctgccgcctcttctgtctgagatctgggacgtccacgaatgaggggcctggtgaccctgccccacagccctgtacccttcagcaaatggacattgttaccccttcctcctcctggagtgggaaggggcccagcctggggtcccaccttgtggcttttagcacaagtcctggccccaccagccctcagcccacgggtgagccccagtcagggtccaggaggctcccccctgcccactgagtcttcctgggagggctggatgggtcatagatcccaacctctgactctcctagcactaccagccgccctccccacccagcttacacctcaagctcactgcgcaccttgaacagagggattgggggacctgaggctctcccctccagcctgagagactgcaggcctcctcccnnnnntccttttatttaataaaaac

SEQ ID NO: 10373 - DNA, 551 bp, Canis familiaris
  misc_feature (1)..(551): n = a or c or g or t
cgcgctggtcccgggtnntcacctggnnncgcgggggacggcagcagcagcccacttccccctggggtcccgcaggtgtcggcgtgtccaggactgtccacctgtaaccagctggtcccgggtcctggcggggggcacgggggacggcagcagcagcccacttccccctggggtcccggcaggtgtcggcgtgtccaggactgtccacctgtaaccaggagtacctgcctgcttcagctgaggcaggcgtctcgtttgtttctgtcagtcaggagggtggaagtgtgggttcagcaggcagaatgtttgtggggggcccaaannnnnaannnnagcctattcgagaagtgcacagaaacctacccagaaccctgacttctttcttgttcctgtaacctctttgggatgtgaacacatcacagttatgaccaaactggcatggtagtcatatgtatgcctacttggcatgatatatttaggagtgaaaagaagtgtatggtacatctgttttcaggattttcgtcttaggaaacccaaagcagagaaagaca

SEQ ID NO: 10374 - DNA, 573 bp, Canis familiaris
  misc_feature (1)..(573): n = a or c or g or t
cacaccacacnnnagatcccggnnannagtgctgagggcgccctcactctggcncgtctattcgttcccacaggctgcactgacataacctggtaacaatggcctcctcagctctgcatctgtctatctgctgtgctgctttcaggataggaagagagacagaagctacactgcagttagcatctgtatcctccagttagtgttgccagtaaaatattcttagtcacagagatttgtgctttggattccacataaccatctgccttttatgtcatggtccaaccagacagaattccttctattgcgcacacaaggccagtatactgtggtgtcacgtttgtttcaaatacacagcttggcattctgtttactttgtgtttaccctgagtgaagacacttcttgggaatggctgcagtcaggccacattgtttacacactgaggtgtatcatcaatgatttctatgtttgcattccattgtcctgcttactgaggtcttggactccccaggaagccagttaaaagggactgagtgttgtgtcaactgttgcagcgtttttcatatatgtgttca

SEQ ID NO: 10375 - DNA, 572 bp, Canis familiaris
  misc_feature (1)..(572): n = a or c or g or t
tacgcnntcggcttgaagacatttcnnagntgggtgaannaaagnnnnatcagagaannngcannnnnatactgggacctcatgcagcttggcagataatataaagaagtggtttcattcatgctgannagctgtgtgcctttccacccctcccctgctccccctccccgctcccgagagttctctcctgcttgcacgtagtgtactccatggggtttgaagcagtggggctccactggactttctcctcttctcccccatgaggaacttaaaaggaggtcaaagtaaagactgacgcgtagtctcacctaagatgaggggaaacgtagttcatcgtacacattgacgactgtcaccaaaaatccataaaacaatagtactgtgcctctttctgaaacagcggacgacacaaaactcttagagcgactaaaatggtgacaggtagctgggacctaggctctcgtaccatgaaggttgttttgcttattgtatatttgtgtatgtagtgtaactattttgtacaatagaggactgtaactactattatagnnnnnncagattgaaatttagat

SEQ ID NO: 10376 - DNA, 616 bp, Canis familiaris
  misc_feature (1)..(616): n = a or c or g or t
acactgcactcaacaatcnntattatnatctcaagaatgaagcactgaaaagtgaagaaggctgcattccaaatgtcgccccagacatctgcatagcatataaactgcacctagagtgtagcaggctaatcaaccttgtagactggtcagaggcttttgcaacagttgtgacagctgctgaaaaaatggatgcagattctgcaacctcagaagaaaggaatgaaattatccatgctcggtttattagagctgtttctgaactagaacttttaggatttataaaacctaccaaacagaagactgaccatgtggcaaggctaacatggggaggctgctagaaagccatggaatgaagccagaagtatcacattaagcttaagagaaaaatgagaccaggcatatttacataccaccggaagactcttggtgagaaatgtgtaatccttgtgtgtgtttgatcagaaagtactgttaacccaaacaggaatatatcaaaaacacctctggagtactttagaacccaacaaatgacatgcttattacattgtaactacaacctcctccacattatcactgtaattttcatagtcattactaaattataaattnnncttga

SEQ ID NO: 10377 - DNA, 512 bp, Canis familiaris
  misc_feature (1)..(512): n = a or c or g or t
cgcctcacccaaaccacgcacacgnntccaaggccttgcctgnntcggggctgcagctgagagctttgccccacctcattccttccacaggggaagccggtgggactacacaggggtgcgccccgacacgccccgtacggcctgccccacctggagcgcggaagccctgatcctggacaggtatctccagaccggaaacagcaggtgacccacttccctgagcctctcaccacatatgacaagtaagcattaggaggcccgcttcctagcgcctgccccgtggctgcggcaggacaggcccagcgtctgtccccgaaggcagggcagaaaacggcagctccttcaaggagcagacggctaggcccacggttctaagtgtttggaattcagatctcgaaacctctcacagtgatcccttgacttgtctgtgacctccaaaatgtgtcttaatttaaaaaataaatgtatgcacaatcccattttaaaatttgaaagaaaaaaaaaggccaatg

SEQ ID NO: 10378 - DNA, 561 bp, Canis familiaris
tatagaaggtgatgtaataattcattcattgtgctggatctttcttactcataattcaatgaaggaaatagagaattatatttttgctttgtttctcatggaagtaataggatttttcatggtaatccaaggtaaaaaaaataaatattcatgaattttcaattgttttaggtaggagatgataaatttgttatgactgaatatgtcatattctagtccttttgtagcatgtttatagtcaagtaactatctctcaaagacctaaggtagttttaaacgtagtgaagtggcccatagccagctgggccaagccctgccacttcataccatcctattctagaccgttgagagaatgagcagtaatacatgttgcagagcaatatttctagagtataacttttaatctgaaaaattaatggcaaacctaagctatctctggagtttctcaaaaattaatgcaaataatcccataatgttcattccagaaaagagatgacagtttgtaatgagtaatgatgcaaatgttcttatggtggctttcaaatttttctttttttgagg

SEQ ID NO: 10379 - DNA, 497 bp, Canis familiaris
  misc_feature (1)..(497): n = a or c or g or t
cttcttaatttttagnctctcntctacagattggtaaaatttctctttaagtcnnaccttcaaaatgccaagggtgggtgagaacttcagcaactcctctataacatcattataccctttgttggctgcttttagtaaagctgttgtaccgtccttaacagagaggaaaagaaaagttgactattaacatatgtgcgtgttggctaagaactaattgttacttgagaaccaggaatatgcttgtcagaataggtgaaagatttaaaccaaaggacaagtgggccatatttcttaacctaggagtattttagagcatatttagttctgcatgaaagagtgctagacaaaataatttattatcttagaatcctgcctttggggattcatctcttttagtctctagaacagtgggtaaagggagaggggaatatcaagaatgtattttaggacacagattgaccaaagaagcatcgtctgcaatttacgacttagcagaa

SEQ ID NO: 10380 - DNA, 516 bp, Canis familiaris
  misc_feature (1)..(516): n = a or c or g or t
gcttgcctttgggcaggcnctttaggattctgctgctagccccacctgaacagaggctcaaggaagcctgggaccaggaagctgtctcaccatccccaacacagcctggaagtagaacccaggtcatctttgaacaatggctgggaaagtaaatggcgcagctccttcttcaggaccttcatctgcttttgtctcctacgttcttcttgctggtcagtttttcttccttaaaacacaatacaaaacagaccatatttactatgatttgtagaaatgttttgtttcccttgatggatacttgtgatgaaaaatgttttggaactcttggggaatcaaggctcaaaagttctctaaagacgctagtattggctaacttctagcacagtttgagagggatactaggggggggggccactgggtccttcactctatttatctatctatttatttttatttatttatttactccgtggatcaataatttactatgagttatgacaatactaaatttggtca

SEQ ID NO: 10381 - DNA, 564 bp, Canis familiaris
  misc_feature (1)..(564): n = a or c or g or t
atactnncgatcttcctccccaaccatcgcgctgcctgtgctcctgcaggctctggccctctccaannagtaccgattacagtacttggnctcagaaacggtgctgaacttggctttcgctcagctcatccttnnaatcccagaacaggccttaagtcttctccacatggccattgagcccatcttggctgatggggcggtcctggacaaaggccgagccatgttcttggtggccaagtgccaagtggcttcagcagcttcttatgacccactgaagaaagcagaagctctggaggcagccatcgaaaatctcaatgaagccaagaactattttgcaaaggtcgactgcaaagaacagatcagagatgttgtttacttccaggccagactctaccatacgctgggcaagacccaggagaggaaccagtgtgcgatgctcttccggcagcttcatcaggagctgccctctcatggggtgcccttgatcaatcatctctagtgggagtatccctgctgggccctcaatagactagaagattttgaacttctttacatcccctccct

SEQ ID NO: 10382 - DNA, 434 bp, Canis familiaris
  misc_feature (1)..(434): n = a or c or g or t
catnngcagtctttgtcttcntgtnnngcatcgctgntnttntgctctatgttggttatacgagcctgtatcgggntagncgaaaacttcccatgattgactttgttgttactcttgttgctgcttttctgtggttggtgagcacttcagnntgggcnaaagctnttnnagatattaaaatagctactggtcatggtattgtcaaggaacttcagnnntgtaatcatcaaggagtgatgtgttattttggctccgtgactagtatgggatcnnnnaatgtatctgtgatctttggctttctgaatatgatactttggggaggaaatgcatggtttgtatacaaggagaccagtttannnagtccatcaaatacttctgcttcnnnnggccaaggaggtattcnnnnnnnnnntggaatataattataaagggag

SEQ ID NO: 10383 - DNA, 310 bp, Canis familiaris
  misc_feature (1)..(310): n = a or c or g or t
ccatgccacaggannacagcgctccgcatancntagagatgagcagnnccactgagtagatgctcagcacatgctgacctcccccgggacaacgcgctnnacagcatcacctggtagcccgaagagagatgaaggtctaacctnnannagccctcacctctgctgcgtccccaagctgcagcttcctggtgccatgaggctcagagacaaaatttgcaccttctccccctttgtctcgctgcacctcggccatccccatggggaagcggcgagtacggtaggagacagcagcatccgcttgtcctgtgcg

SEQ ID NO: 10384 - DNA, 371 bp, Canis familiaris
  misc_feature (1)..(371): n = a or c or g or t
caggggctnntctccccaggtgccggggagaacaacaaccctgtnnttacggaaatnctcttgtgtgtggcagtggactcaggcacaggatcacagaaggtgaggataacatgcttgtgagacacgcccgcctcctctggaagcctggttcaggaagccaggtcgaaacccagatgacccgcacccccactgcctcccagcgcttcatagcagtatgaccctgggcaagttccactctgccctctgtgcgagctccccactatggtacagagcagtctttcttaagtatatcacatcaggtcacccccctgctcaaacccttcagtggcttcctacctttctcaaagtccaaggatttgggcagcctgggt

SEQ ID NO: 10385 - DNA, 570 bp, Canis familiaris
  misc_feature (1)..(570): n = a or c or g or t
gtgcctatatggggnnnnnaagaagaggtaatgagtcataactctcaggtgcagttgtccaccagagccatggaactgttacgggttaaaggtcaaagatcctggtctgttggactatcagtagctgacctggttgacagtattgtaaacgataaaaagaaagtacattctgtatcaactttagcaaagggatattatgatataaataatgaagtgttcttaagtttgccttgcatcgtaggaaccagtggggtatctgaagtcatcaaaaacacagtgaaggaagatacagtgactgagaaactccagagcagttcatcatcaatccatgatctccaacaacagttaaaactgtgattttaaagttgttaccaggaaggaaaggtcatttaattttgccaacatatatagggttgagaacttctatatcttattacttacccttacaaactgcttggttatggtgggtttccagttagctttgtaatttgaaaccttagggagttagataaggaggggggaaaaatataattttctttgttgctcttgagctatctaaaccattcttta

SEQ ID NO: 10386 - DNA, 536 bp, Canis familiaris
  misc_feature (1)..(536): n = a or c or g or t
ttctatctgattatnctcatctacagattaggattaaggtgtcannggcatataccatgttatgaaacaaaaaaatgaccatatatatttttcatagcattttgaaaatattaaggaatataaaattgtaattatgaaaacaactcttaagaaagtttcattttgcaacatgatttccaacattaatacatattaagatgaaggaaatattaaatataggaatatgaagatttcataattttgttttatttatgaaaacctcagaaattgtagttaatttgttaaccactcagtgtctgtccatgatgtagactcaagggagggatggacttgagatgaggaattaactctgtgtcaattcctgtagaaaattcttagttttttccaagaatagttgatgatatagaatcaactgagcgcacacacagtactgaaaattcagtacccagttnngctattgtaaaatttacttttatatttatgtgcccattgtgaaaaatcctgagggaattgaacttaagatgtaaaacatgttt

SEQ ID NO: 10387 - DNA, 581 bp, Canis familiaris
  misc_feature (1)..(581): n = a or c or g or t
aatcatgtcatgnagctgaagcaggagatcaacttgctacaggcacaggnctcgaacttcaagcgtgagaatgaagcnctgcggtccggccagggcgccagcctgacggtggtaaagcagaacaccgacgtggccttgcagaacctccgtgtcgtcatgaataatgcccacgcctcaataaagcagctgatttctggagctgaaacattgaatcttgtagctgaaatccttaaatctatagacagaatttctgaaattaaagatgaagaggaggagtcttgatagcactgaggtgcttccaggttgcagcaccactcacactcagacgtccctgtgctctggatttggaagtgccattgcatctttaaacgtgttgtcctcacccgtagtaaagatatttatcatgacatactaatttcataacctgacagcactagcagctaactgcaaggacaagcaggccacatgtgagagccacgcctggctcctctgcagcccttctgggtgagctcccactacttcacagacagactctgatgctctatcggaagacgtttctataaaagccagtgattttttga

SEQ ID NO: 10388 - DNA, 585 bp, Canis familiaris
  misc_feature (1)..(585): n = a or c or g or t
catcttctatttaaatctcnnggatcaaagatcagtaaagtacgtaagnnnnacaggccaaaaccagcctactgcctggttttgtatggccagtgagatgaggatggcttttatggttttaaaatggttgggggaaaaataaaatcaaaagaaaaatactgacatgtgaaaattaagtgaattcaaattttagtgtccatcaataaagttattggaatgcagctacactcatcatttctgtactgtctggctacttctgcaccacagtaggaaggctgagtagctgctacagaaactgcttatggctttctcatcctttcacattccttcttggtatgctacaaaatcagtgatgcagatacgatgtgaaagcatttggagtgcctggtctatctatacaacaatttatttttctgttaccagcttatatccattatatccaaacagaaaactgtactttgaatgatgtgccttgaaggcacaatagagtgttaactaaatcatatggtaaaataatgtgtcatgcaatgatactgtaactgctaaaaaatgcaatatatgttgacataaccagaccaagcactc

SEQ ID NO: 10389 - DNA, 569 bp, Canis familiaris
  misc_feature (1)..(569): n = a or c or g or t
agcagctagggnaagtgctcttgctgtgtggcctcaggcctgacccaccctgttaggggccatacaggccaagggggagtgtcctgcatcccctcctatcagagtcgggcccagggcagccctgcccatctgcctcgcttctgcccctgggaagtgccttccgtggccctggtccagccacagcccctggcatctcagtgagaacatagcgtcacatagccaggaccctgagggggacagtgaagtgcttccagtgacttggccaatccctttcagagctctttgaaccccggatgttcaaacagccccagagctacttgggtgcccctgcctctcacaggagccctggggccatgagggtgcatccaggacggagggcagctactctagggctggggacagatgccgcttgtcccgccctggtccccagctgggtgctgagtggctggcatccctgcctgctgcgactcctgaagggcctgtctgtctttggcctcacctgtcctcaagagccttggttttcccacnnnnngacaagagccccannnnnctgtgctggcacagggctg

SEQ ID NO: 10390 - DNA, 570 bp, Canis familiaris
  misc_feature (1)..(570): n = a or c or g or t
ctacagcagcatgccaaccagtannnnagnnnnnnnnntgcccnngtnnaaaaggccnccgcnnngcnnnaacgnnagnnngaaagagagagnnaccgccactcccccttcggccagcggcacctgcacacacatcaccacacccacgttggcatgggttacccactaatcccgggtcaatatgaccctttccaaggcttgacctccgctgccctcgttgcctctcagcaggtggctgcccaggcatctgcatcaggaatgtttcctgcacaaagaagagaataacaagatcggaaatgtacgttgtcatgtgactggatcacatggggaagcgctttatacagacatcagttccatggtgttaatttgaaatgcctttaatggcaggcaaaaaccagtcatttcatttttgtaaattacagattttatcacagagtaacaaatgttgctgtaattaaacttctgttttatatatatatacgtatacatatatgtatatatacatatatatatatatattctttactttttgtatcagtaaccaggctcgcacacacagggtctgctgcc

SEQ ID NO: 10391 - DNA, 610 bp, Canis familiaris
  misc_feature (1)..(601): n = a or c or g or t
gatcacatcgnnnnnctggggctttttcccacggcggctctgctggtctcgcacgacttctgcctcccggggggccgctacctcccccatgggctgggtgannagctgcccntgcgcctgggcccggggctcgaggtgtgggccacgccgggccatgggggccagcgggacgtgagtgtggtggtggcgggcacggccctgggcaccgtggtggtggcgggcgatgtgtttgaacgcagcggagacgaagactcctggcaagcgctgagcgaagacccggtggcccaggatcgcagccgtaagagggtcctaggcattgcggacgtggtcgtgcctggtcacggagccccctttagggtgatcagggaagcccctcagccaaggaactgacgtccagaagaccagaggacccagtcagagtcagcgcgccagaggagtccggggtgatcgcttccagccctcgcaagaggcgggtgcctagcgagaacagtcatcgatatcactggttctgcagccaaatgaggaccaaggactggctcaactgtgtgccacctcttggggcctccataaaatggaagaatgttcttgagggggttatccaaaataaaaa

SEQ ID NO: 10392 - DNA, 668 bp, Canis familiaris
  misc_feature (1)..(668): n = a or c or g or t
atgaaaaaataaaggtaactccttccaaatctgctttgtatagctccagnntttttctagtttcacttgctgncttttctattttatgggtactttttatatgaccgcttccccaacgcagccaaaggccagtatgacggaactgatggcacacatcacctctgttttgcccatttgggaaaatgtttgtaagacgatcagtatcttctaatggccgtcactatcatgtccgtacaaaaatccatttaaagtccttaaatataggtggaacaatgtatgtgcactgtactctctacaaaaaatgtttgctgtctttatatagcatactgttacacgctagctatacggtttgcttggtcctttaagaacaaaagtcctccatacacagcactgtccactacagtagtgtctgaccgttcaaagcctagaaatttgaggatactcctttacctagtatgtgttggaacagaattctccacgccagggctccccgagcagctcctgaatctcacaggccaggtacagggcatactgtctagctgttggaacgaaccccttagagaatggtaattaaagcacgtcaaccacaagttggatttagtattgtaaaaaatgttgaactctgagggttacattgaaaatgtgnnnnntcaaatgtatgcttttaa

SEQ ID NO: 10393 - DNA, 612 bp, Canis familiaris
  misc_feature (1)..(612): n = a or c or g or t
ccgtgacttgctcttccaagccatgctgtagagaaatnncaaaaatnnngcgccacaaagcccagtatttggtngagactgaacagactgccctccagacggggctgtaccaatttacaccctcaccaccaagtataggagaggcctgtttccccacattcctgctgcatcggttggggttctctagagaaagagaaccaataggatacagagaaagagatttatagcaaggtgttataggattgtggggtctagcgagtnctaaatgctggccgcgggcaggttgggcaaaagttgatgttgccatcttnngtctgaaatctgcagggcaggtcaactgtctggaaattcaggcaggatttctgttacagtcctgaagcagaattccttcttggggaaacctcactttttactcttaaggccttcaactgattggatgaggcccacccacactacggagggtaataatctctctaaagccaactgatgttaatcatccacagagataccttcacaggaacatctggactcacattagaccaaacaaccaggcaccatggcctagccaaactgacgtgtaaaattaaccatcacacctgcgatcgcttgatc

SEQ ID NO: 10394 - DNA, 557 bp, Canis familiaris
  misc_feature (1)..(557): n = a or c or g or t
ttaaattttaaatattcattgtaaaatctaaattctacaaagnctacttctatttaattctcttaacatatgataatcaaaatctnaaaaacattatgctcggtaaagaatgttgtcagccggctttgctgaaaaatttatcttctacagcttagannaaggaataatattgtcccagcaatctttgatccccatgactttggatctgaagagagaccccccactcatcacccacaagctccccccaatattttaattgtgagtcctacaatttccacagataaaattaaaccaagcagggatactcctttctgtaaaaacaacaaacaagttacaatgtaaataaatatattagtcattttccatgtgactaaaatataagattttgttatctgttttggcacttagttctttctttgtctgaaatggttcactctgacccatttccttggtcagtcaagctgaaatggaaggcctctgtttgtatgtggactcctgtatatctaacttttgattatgtgggaccaatggccagtatattctaatgaaaacaaacc

SEQ ID NO: 10395 - DNA, 585 bp, Canis familiaris
  misc_feature (1)..(585): n = a or c or g or t
tnngttgtngactctgttgatgttgaaagaatngaagaagccaaaactgaacttcataaaataannaggatatcagaaaatcagggagtccctgtacttatcgttgctaacaaacaggacctgaggaactcactgtctctgtcagaaattgagaaattgttagcaatgggtgaactgagctcatcaactccctggcatttanagcccacctgtgcaatcataggagatggactaaaggaaggacttgagaaactacatgatatgataattaaaagaagaaaaatgttgcggcaacagaaaaagaaaagatgaatggtgatcctttttatatctgtgtggagtaggttttctctggtctgatgttgacaaatggaagagtgtctacagcctggtttgcccgcctgccctcctggatgctgataaagctttgttttgttgaacaatccgatgcccaactcttttgccttgtggaaaatgagtaaatgcagtgcttcttaaaatggtctcttctccctaccccacaaagcttttggtactaccattctgggaagccaagcatggatagtttattgaccagaaaacagt

SEQ ID NO: 10396 - DNA, 533 bp, Canis familiaris
  misc_feature (1)..(533): n = a or c or g or t
ctgtcagcatgtctccctctatcccaattcccattcactgtagttttannaactccattaaagaggcctgtatgtgttttgattagnnaacagttattttacaataatggtnggaaatgnnnnnanntctgttatgagataatgttctaatcaatgtactctttgcctctgtattttttctgagggctctgttgctcccttcattctaatgaaaggtgtatcctggtgtcaggtgcacgtcatccaggatagtttcctgccaacaccgtccattgttcctagatcccctcccactcacatatgtggacctgacagtttgtccctgcagtgattctgaggcactattccagggactcattgacttttttgccttcttttctccacttctttggggagtgggggaactgacctttctaatacgtgcaccatcaaggggcatccccatagccattgggtcatggggtgttctggggccagaaggcaagggcagatcacttcaagcaagcccccacaatggcttagtcctgcttccc

SEQ ID NO: 10397 - DNA, 555 bp, Canis familiaris
  misc_feature (1)..(555): n = a or c or g or t
gnngtgctgcagcagatgttctttggggtcgtcatctgtgcgctggccacactggccgctaannnnnacttggtcttcaccgccatcttcatcggggccgtggcggccatgactggctactggctgtcagagcgcagtgaccgtgtgctggagggcttcatcaagggcagatagtccccgccgtacctgcaggatctcctcccatccaggctgtccccagagggccagcttctttcccacctggacactggaggcagcttgctttctttttgagtggggtaagcacctcctaccaccaggccggggcaggcaaggcccttggagtgaaaaagtagccctaaatgtggatgccatgagctcttggcctgggggaaactgggcaggcttcacaatgtgtgaatttttaaaaagtatctccttgtggtggctgcttgtgggctctgggctctggcccctgcctggggtgagggggtgccctccagggctgggcccatcacagtcccctcctgccagctgcatgctgccacctcctgnnnnnnactcagcgcccctgcc

SEQ ID NO: 10398 - DNA, 331 bp, Canis familiaris
  misc_feature (1)..(331): n = a or c or g or t
gcctcagcatanctcatagaccctgccttgcaagcacatcccccatctgagccctccacaccttttccactcacagctctnnnngcctcccggctaccagctgctgtcctttcttgctcaaaagattcaacaacttccnagttcaatggcttttaattctttgtcttttttttgtatatatatatttttttattggcattcaatnngnnaagacatagtataacaattctttgccaacagccagagtgagccttttnnaannaaggcatattgagacacttgggtgnntnnaggttgagcatctnnnntcagctcaggtcctgatcccggg

SEQ ID NO: 10399 - DNA, 603 bp, Canis familiaris
tgcactgtcattcttgtcctgcctgtttcatattagcagaggaccaaaggatggaaaatgctaacagtttccaaagctgagctcagcaatctaatatgctcctggtttttcacttatttttctccacgttccccattccatctccttagattgtgtatctgttttagtgaccctgacactctgctgtcatcactgtccaaatacccatttatttatttatttgagaggaaagagagagaggaaagagtatgggatgttttgaaagcactttgcaacttataccagtatctaaaaacctcctgctgttgtagggggaaagctttgaatgcactgaagagcattccttctgagtgaaatgggagggaagaagtgttctttttcataaataaagggaaaaaaagttaaaagtttgcttacaaggtagagacaagattcaagacaaagcagaagagtggaagacagatatcttccacttaaatgaggctttctctgccaagactttagagcttttgttgaattaacatgaaaggaggaagagtctaaatagagatgatctgttcatgtgcaactcgtgttctgaactggatttctactctctgtaat

SEQ ID NO: 10400 - DNA, 609 bp, Canis familiaris
  misc_feature (1)..(609): n = a or c or g or t
aaaaaacannatgcatcgaggtttatgggtaccacaacaacaaagtatacaggaatactggaaatgtgtgaaaagagaaagcattaaaggagtaaaagaagtctggaaacaagctggaaaaggtctcttttagaaaaagctaatatgggaactatattgctccaaatgtactagtaatttagaaatttttttaagtactagatacttatcttgattttctttgtaatataaagatgccttgtatttactttctgattcagtaatttcttaataaaatttcatcaaagaacttagtaaaaatagatactggattctatcagaggatctagaattgaagtaatgctttgtactttgataagatggaaaacctagttattcacggacttcttagacgcagtattaccatgtgctcttcagaaaggtgtcggctagtacttacagaaaaaaatatttgatacacaggccaatatcacatccaggagtcctgatgatcccagtaaggcaaattaaatttaaaacatctcaggttttctcattgtatgtcatatctcataagctccttgtgtattttgcttgttagctgtatattaattttctctaaaataatat

SEQ ID NO: 10401 - DNA, 538 bp, Canis familiaris
  misc_feature (1)..(538): n = a or c or g or t
tgaagcatacaaaactctgagtnntttgtacaatgaaatgcaaaaaatgaatgaacttgagaataaggctgnnnctggaacacacttatgcattgatgtggaagatgcaatgaacattactcgaaaactttggagtcgaactttcaattgttcagtcccatgcagtgacacagtgcctgtcattgctgtttctgtgttcattctctttctaccggttgtcttctaccttagtagctttcttcattcggagcaaaagaaacgtaaactcattctacccaaacgtctcaagtccagtaccagctttgcaaacattcaggaaaattcaaactgaaatctagaaaatagagaattaacatcatatgccatggatggatgctggaagatacagcttggttcaaaagaagattaactgattcgacaagtcaacttcctcagaaatgcaaggacttcagatttatttttaaataagaattttccatttttctttccttttccatccctttttttaagagtttaggtattttaaatttccaggcct

SEQ ID NO: 10402 - DNA, 541 bp, Canis familiaris
  misc_feature (1)..(541): n = a or c or g or t
cttagtccatcagcatcttattctgggtaataaaaaataaaaataaatggatacctgttttccactgctaaaactgaagcaccactgtgagcaacannnnngnnagaggagcacccgagggaggagcccgagacagagcgagcgcccactgctggcccgcggcggcgaggagaaggagaagggagagcgggaggcgggcggccnnnnaggaccgcccgccagcgagccctgccagccccgctcgccaaggaggcccagcgctcgccgcgtccacacctgggtctgcgaccagggcggagggaggaagaccctcatctcagagtagccctttcctctgttcttttctttctgtttctcttttattgaaaggggactacgttttagcaggaaaaacttcgcatttctgtgccgagcaggctccttgcggggcagccgtgccgggaaagccccgcggaggtgtgggttctgtccacaccagctctgaaactgccctggtcacgctgcctgtgttctaagagcgtttcatttaaagaaaacacgg

SEQ ID NO: 10403 - DNA, 605 bp, Canis familiaris
  misc_feature (1)..(605): n = a or c or g or t
tgcatgtgtagtttgagtacagattccaaacttatggctgnnnnnnnnnnagtatgatcgaaagtttctttttttccttgctcnnaataaactgaactgtgggtnctctgtagaaggtggcattttgggctttccctctctttgtaaagcgatttctgcctagtttattgtctggttaactttagtttaatgaccttttaaaagttggcattgtaaataaaacaagttgaaaaaagttttctgaaatagaattaacaacgtattatctttattcatgagttggaaactggaaaaaggctacttgaggtaaatgttttgagtggggttattaggatgtcttccaacttcctggagtcaaggagtaccactggtattgatgagcctgtatgtagctgggctcccttaattggatctaaagacttgtttttgcatttttaatccttagctttgaatacattggctagagactcagttactactcagtttgtggttttgggggaaatttaactagccagtctgttagcttttcaattaaaaaaggcaaataacccatgtagtatgtcannnntttatcatcagttnnnnnatgtgggggaaacttcaca

SEQ ID NO: 10404 - DNA, 604 bp, Canis familiaris
  misc_feature (1)..(604): n = a or c or g or t
agctgcacannncaacttaccaaaacttcgggtgatattagggattacaaatccatcaaatcctgatgaaaaggatgtacaagttgnnngctatgagaggatgatccatcatccacgcttctcagttactgctattgagaatgacctcatgttaatcaagctgagagaaaatattgaactcaatgactatgtgaaagtggtcagtctgcctgaagaacctgtccgtgaggaagccatgtgcatggtctccacgtgggcctacaatctatgtgatgactccaaggagcccgactcaccacagagcgtgaacatatccgtaatctacagggatgagtgcctcgatgcctataaaacccaaaggatccaagaaaatatgctgtgtctgggcattgtgccaggaaggaggctgccctgcaaggaagtcacagccgccccagcagtctgcaatggggtacttcaaggaatattgacttttttagatggatgtgttttgagagctgatgttggaatctacaccaacatctttaaatacatgtcctggattagaaatacaatcagagacaactgagctgccatggcaggaattctagatcatgtgacacaa

SEQ ID NO: 10405 - DNA, 592 bp, Canis familiaris
  misc_feature (1)..(592): n = a or c or g or t
cagcttnnnaaatctggatgccaaacgagattggggccatgccaaggactatgtagaggctatgtggctgatgttgcagaacgatgagccagaggattttgtcattgctactggggaagtccatagtgttcgagaatttgtagagaaatcatttttgcacattggaaaaaccattgtgtgggaagggaagaatgaaaatgaggtgggcagatgtaaggagaccggcaaaattcacgtgactgtggatctcaagtactatcgaccaactgaagtggactttctgcagggcgactgctccaaagcgaaacagaagctgagctggaagccccgggtcgcctttgatgagctggtccgggagatggtggacgcggacgtggagctcatgagaaccaacccgaacgcctgaggcccgccgcgacccgaggccgcgacccgagcccggagcgccctttgcccttcgcagcaggcgggccggacccgcaggcctcggcgacgcctcccccgccgcgggggatcagccaggtgtcagcaccgcactcccctgtacttcagattatgtcctttgaccacggaaatcggggcctttcaaatt

SEQ ID NO: 10406 - DNA, 137 bp, Canis familiaris
  misc_feature (1)..(137): n = a or c or g or t
cnnnncgccnnnnnnaggggtcctactcggctnnnnnnnnnnctgtctccccgcatcnnncgtggccccacatgatgtgctccaaggccagcgccctgcacccagccagcngcttccaaggcatctgggcactccca

SEQ ID NO: 10407 - DNA, 677 bp, Canis familiaris
  misc_feature (1)..(677): n = a or c or g or t
gtttcannagcatccttgctccaantagattttannnccatttttnngcanagnnnttttgagtggtttcacgcagttatttttggaaaagctgcattnnagtngataaattcttcttcagcatgcattttaaatgagggaggaagaattcgatttaatttcagtttcaaatattttggggtaaaagatagttctacagcttttgacattcaagaggtctttggaattgttttatcaagtgtgggcacatcagaatggccaacttcacatgggtttctctattccctggtgctgctcataacctgaactcatcatcagttgccatactgaggtgagagcactcagggtgaatgtagtcacgtttctttaaaagtgatcaaagtgttttctgtggtgaggccttcagtatttgaacgcagagtatgcggaagtggtaagtcagtgtaagtttttcgtcattaaccttgtttgcacttttgtacactgctgcttgcactagcatcttagtgtgaattttaacaatggttttacagtgtatacagattgttaagtataatttatataaatatgtttctttacctttatgtattttacaaagaacagctatgatagatggttaaaggttcttgaattgtgtttttatgttattttgattgtgttctattatcattcacccc

SEQ ID NO: 10408 - DNA, 569 bp, Canis familiaris
  misc_feature (1)..(569): n = a or c or g or t
gaaggtgactgagatataccagttcaaattcanntacacaaaagaannagccacaatggattttgacagtagtgcaagctttgaaagtgggacaaacagtgaagatattaagaaagccagtattctactgatccgtaaattatatatactgatgcagaaccttggaccccttcctaatgatgttatacttactatgaaactccactactataatgcagtgactccacatgattaccaaccccctggttttaaagaaggggtaaactcacacctcctgctgttcgagggggagcctgttaacctgcaagtgggattggtctccactggttttcatagcatgaaagtaaaagtcacaactgaggtcaccagagtgtctgatttggagaacaatctctttcaggagaacagcactactgagattgctcatcagggtctagacttcgatgaggaagaagaggaatgcaacaatcacattcaaagaatgaattttgcgtacagtcagcaaagttctgagagctccaggaagaagaggaaggtcagcgaaccagtgaaagccttcatccctgaca

SEQ ID NO: 10409 - DNA, 557 bp, Canis familiaris
  misc_feature (1)..(557): n = a or c or g or t
ggcccaaccctgagccccaggtgggcacaggtgggcgtcacctggnnacccccactgtcagcagcagccccgggacccctcccccagcaaccccaccgctccctactccttggtataagtgcaattaaagccgtgggtgtcgcatcttctccagagctgggccctcccttgccccgcagccctcgaggggggcactgcccagcctggttggggggagggcagcagggggcactgcctccagcttccaaagagcagcaggctgggctggacctgggagcccctaggggcctgctgccggcagtggggcccataagtgcccgcctgtcctggcccaggctgggggctcagctccctcagatccaagaccccagtgccccaggtcacccgcctctggtttgtaatggaacctctgtgctccttctctcccgggagactgtgctcctcctccgtgcagtgcgacccgccccccacatgactattgtgcgatttgtgagccgcctgagcggagttggtaacttgttggtttttttccaaccatcatggccttatctgttccg

SEQ ID NO: 10410 - DNA, 583 bp, Canis familiaris
  misc_feature (1)..(583): n = a or c or g or t
ctatanngagacaagaatgtgttnttnattttttttaatgtttactgtatatgcagaacaaacaagaaggctcatctttggatttgtaacatatccaaaggctattacagtttttctagtcngctgtgatccatttaaaatgtgctggggtttattctagtgtcactgctcatgctgctgatactaatggcactatcttgatttgaagcatatagttgagggccattgaaagcaatctttcattaatgcagataaaagcagtttacatatgcagagttacaaaatggcatatctgaatctgtaagtaatgactctctgatcacctttcaatgttacatatttctaaaaaccattgcttttggatatggttgctaataagcactttagaaaagaaaaaaaacacctctactatttttctggtcgggtcattgctctttagaagtagcatcagcaatagatttcaaaaataagtagtaagcattacactaaagtgtgtaaatacttcattttttagtcatattgaaaaattctttgcatagttttaaattctgagacacatagtatagtatatgtgtatgcataa

SEQ ID NO: 10411 - DNA, 419 bp, Canis familiaris
  misc_feature (1)..(419): n = a or c or g or t
tccatgctctgcatcccactctggatcttcatcaagatgtggaagacagaggggactctgcctgaggccagtactgttatcctgtttcacagaagaaaatgcaactcctagaggttaggtgagttacctaacagagctagcgaacaggaacagccagcgaacagtgagcaggactccaagcccagctgctttgtctctactggagggagggacctgcagcaggccagaaattccggaagttgaccatccccagcgctgatctgaaaatgcggggcaagcttggggcaggcccacggacggtgaccgttaatgactgtgacgccaaactcaaaggcgatgggaccattgcagccatcacagagaaggagacgcacttctgannnnnncctgccacctcggnnnnctctccttccttccct

SEQ ID NO: 10412 - DNA, 345 bp, Canis familiaris
  misc_feature (1)..(345): n = a or c or g or t
tnnngtccangcggggccaagagagccatcnnncatcataagnnngnatcctcnnnncnnnnnnnnnngggcccnnnnngncccttgtcagnntcncgcccctcccatctttgccnnnnnnncacnnnnnnnngntgggccnannnnnctgtcngggnnngcgggagggaggttgnnagtgatgntgccnnnnnnnnnnntacaggtnnnngcgnnnnncnnncnnnnnncttnnnnnnnntgtntncnnnnnnnnnctcttctgtttccatccaggcttgtgacacgtgggcggtaatccactagagccagactctgcagtgctggggtgactgccttgtaaat

SEQ ID NO: 10413 - DNA, 149 bp, Canis familiaris
  misc_feature (1)..(149): n = a or c or g or t
gccgggctggctcnnngcggggtgcnnncggggccggccaggtgctgcgcccagtagcaggagccgnnncgcccggggcatgcagaggacacccccggggagcccctgccaccgtccccggctccgagaggtcctggaagctggcatcc

SEQ ID NO: 10414 - DNA, 523 bp, Canis familiaris
  misc_feature (1)..(523): n = a or c or g or t
catcctccctgacaaagaatgatgcagaacaagatcagggcagctnnnngttttattccatgttgctgtgggtgcttaaaaacccagcacagtttcctgctatcccaggctttgcccagtctaataagacaacctgtgtagctgtgatttttttattttgctaaggtttcagaaaaataagtgattcatttgaataaagccaattaggagaaagccccactcagagtgaaatctgagttaacagatgccaactagtactcacaatagataaagaaccgatgctcacagtgtttaaaggcaccggtcccaggacaggttttcagggatttctcctttcgggggttcttttcgggtagctcaggcatttattttaccacatccgcatatgacgaggctgtaaacacatggctttaaaatgatttagtgttcaaatagcagcttcagaattttatatgaaatgcacacacagcttgcctttgtgtttcttttttgttcttaccaaaaaggcaaaaacacaagcatg

SEQ ID NO: 10415 - DNA, 480 bp, Canis familiaris
  misc_feature (1)..(480): n = a or c or g or t
aagaccagtnnncaagaatcctnnngattctgatcttccagtccccaccccacatctatcacataatgtctgaccccttgcccaggccagggagtagggtgggtcacagactcactcttggtagaggcagattaggagagcccctgaggctatagggacctataggtagggctggtccccctctccctccttctgcctgactactccttcttcttcatctatctatagcccatgggaggcaactataatgtcttcctcaatagctccaggttagctgagtggcgcatgagggtggagctggccattggctctggcctcttctgggaggcccatgaccggctgatgaagttggcagagtgggactgttcaacactggatccgatggtcaaggagaagatctgtgtgttgctgcagaagttcagatagaagcagaacttctgcagggcttggctggctcaccnnnnttgagcttcctttctt

SEQ ID NO: 10416 - DNA, 471 bp, Canis familiaris
  misc_feature (1)..(471): n = a or c or g or t
acagagnnnagacgagtggtaacaggaatgccaggcacctccccctgaaacccttagagcaggtgcagcagcaagacaatcgctcaagtcctggcccagcgcagagcaagggaatcaaaagcctggggcccacccagcaatccaccttctgaccagtcctccaggtgcccctgcggtgcactccagtgggagaaccaccggcctggagcactctggtcagcctcctgaatcctgcgggtacagcccaaggctcttccattggcctcagggagcagctgcttgaaaatttctatcctgacacaggagtacccaggcctctgtcagtagctctcaaagttcctcaggaggaaaagaaaagacggtgcagaaagttccatgtacatcagcatgaaaaagtaatccgttaaaatctaactgtaggctaaatcatttgtgatcctctcggcttccagtgtagaggttattcattat

SEQ ID NO: 10417 - DNA, 584 bp, Canis familiaris
  misc_feature (1)..(584): n = a or c or g or t
gtagtttatcatctaaagctttctttttatttttttttagttnnnattccnnagcatccttaataantatgggtgatgagtttttaattcttaaaattatatacgtgtattaggtttatcttaactcttaccctaagcaaaagggatggtatacacctaagggatgtaattattttgcatttttggccttgggtggggatggggtgggcatctacttaaacagtttttaaaaaagaaaaaaaatcacaaatatttttctactattatacatgatcttactttatactagtttctctctagtaaggcatgccagaagcccaaggtaccatatcatgagttcctatgtattgtaccttttattggtggttaaatcgcatcagatgcttggcactgctgccataattatgaaatgcttgtaaaggaataaatatcactgaatactttaaattgttttacttaagagtttaatctgggaagttttcaaatcatactattaatgtgtaatctaagctctttcagatgtatccatgaataatcctggaacaatattgcttgtattcctgtcacagaacaggttttgtaat

SEQ ID NO: 10418 - DNA, 577 bp, Canis familiaris
  misc_feature (1)..(577): n = a or c or g or t
cccaacgaattcagcttggtagctnnctggttcttcttccccctcattcagcactttgacaggnntctggtgacctttgaccttttgggagaggaccaactggtccttgggagattggcccacactttaggagccatgatgtacctggctgtgaacaccacggtggctgtgcccatgtgcaaggccctcttggaatttgtgtggacccttcgtttccacggtgatgcctacgtgcgccaaggcctgttgtctgcggtctccgctgtcctgctcagcgttccgactgctcggctgctgactgacctgccagacgagctgctggaagctgggccctggctggcggatgtggcggagcaggactccgacgaggactgcagggtgttggctgtgaaagcattgctgctcctggagaagctcaaagacacactcctcccgctgacgcctccttagcctgagtgctccagcagtggcccacgccagggcctccggcactgccccgcggacacggcatccccggagggaggagctgctggggcccctgtgggctgattctcnnnnnntccccaagccccttcct

SEQ ID NO: 10419 - DNA, 605 bp, Canis familiaris
  misc_feature (1)..(605): n = a or c or g or t
gtcnnatgatcatctttgttgctgtcatcatcatcannatcancagtatcatcatcttgatagntgtnnannnngcatagaaatcccatcaanctttctttgnaggctttctnnagcgacnntagctccagccaggtttgagcatcgccagcccctcccccaggagaccgttgcagttggccgccccctgctccttggtaaccatgtgcaaccaaaaggccgtgataaaaacgctgatatgtcggaggagatgcaacaggactcggtggagtgtgtgactcaggcattggagaaatataacatagagaaggatgttgcggcccatattaagaaggagtttgacaagaagtacaaccccacctggcactgcattgtggggaggaacttcagtagttatgtgacacatgaaaccaaacacttcatctacttctacctgggccaagtggccattcttctgttcaaatctggttgaaagcatggactgtgtcacacacccagtgatccatccaaaactaaggactgcagcctaaattccaaataccagagactgaaatcttcagccctgcctgggggaacacctcgagcnnnnnaactttattgtgttg

SEQ ID NO: 10420 - DNA, 479 bp, Canis familiaris
  misc_feature (1)..(479): n = a or c or g or t
atgaggtcggctacatatggtagtccccacaannnagagnnnacgaggttngnacagaattgcaaatcacttcctactcctgcatttgnnnnnnngactcnnnnncaccaaggccnnnnntccattgttgctctctgtacctgaccnnnggtttggaagaccactccntgtccccagagcattctggttatgcatacagttgtgtgggaagaagggtgttgtgttttgtgttttagacaggggactggctggctgaattagagcctccttccctcccgtgagatttttgctaacgagcatgtgatgtatgtgggattctgacagtgcagggagcccccaccttgtaaacgnngaagatgctttttgattacccacaccaatggttattccannnnnngttcccggccttacggtgtctaagtgcttttcttgtgtcctgtagatgtcgtggaaaacacaccacannnnnntttataacc

SEQ ID NO: 10421 - DNA, 530 bp, Canis familiaris
ccattaaaaaaaatgtgcttgaggaagtatcggtcaaaggtgaagatgtacccccagcactgccaccaaagattggaactccaacaagaccctgtccaccaccacctgggaaaagacccatcaacaaattggattcttctgatccttttaaactgaatgatccatttcagcctttcccagacaatgatagccccaaagaaaaagatcctgatatgttttgcgattcattcacttctactactactactactaccactaccaataaagaggctgacccaagcaattttgctaacttcagtgcttatccctctgaagaagatatgattgaatgggccaagagggaaagtgagagagaggaagagcagaggcttgcccgactaaatcagcaagagcaggaagatttagaactggctattgcactcagcaaatctgagatctcagaagcatgaagaattttcctgtcctttgtcaaccatacaatattcttcttcctgaatactgaagctctttacagtgtgtatcaaaactac

SEQ ID NO: 10422 - DNA, 477 bp, Canis familiaris
  misc_feature (1)..(477): n = a or c or g or t
ttcaaatgcaanannnnctacnnnnanacagttccagataacatttnnnttcggtgactaaaaaatgttgataccataggtgatgtacaatttaccttttaatgagatactatgttatcactatatctgatgctacnttacntaagaagggccagaatatgaaactgttctaagtgaatacttaagatctattttagataatctgaacaaattatttaatctgtttcactgttgggatattccacagtagtagataaccatataantactaaatattnnnnnnacatgcattgatattacctcttttttacctgccaaaatgtgttctccattgatattttacccatataccaccttgaagaaatttaaaggtagattttttcatttgtgtaatcagattttaaatcttattttgaagttccataaataacactcaatnnnntctcattttaatgatnnnaaggtaaatctttcatt

SEQ ID NO: 10423 - DNA, 585 bp, Canis familiaris
  misc_feature (1)..(585): n = a or c or g or t
gatctnngagagagaatgtcgccgtcattagacattatggggtaggagttgaagcgagatnnncaagaactaagaaatgagtaggtgctgagaaaaggagaatttaactatattacaaatatatgaaataatttcagtaaagtcggtaaggggagttgctgacctaagtaactttgggaagaggtacatttgtaagactaaaggcaaaaggaactggatgtaagcactatactctagttgagagatttgatacttaatgtgggtacaagttaacaattcaggtactgtttatacttgtatctgaaattgaataattccagtaaatagatacatccaaggtaaatggatggcagatgttgagagccaggtttctcacagttggaatggaatatacaaataagaggagaccagaaagatccatgcaatgattgattagatttagagggagtctataatgacatcccagtagtaatgaattctcttagggcctagatctttgtttctaataccattctccaattaaaagcgaaacaaaacaaaactaggtctccttggagaaatgactgggacaggaactatacaaga

SEQ ID NO: 10424 - DNA, 532 bp, Canis familiaris
  misc_feature (1)..(532): n = a or c or g or t
gttttagtatttatcaaatanntgaccatttnntacagaaaagtannaaaactnnnncnttnctttannnnaacttatacaaagttnnnnnncagggcannntntttgcttccagggattgggttggggtcnnngngggttcagagcnnngcagagtngtcagctttattctgacataagnnngagggtannnggcaaggatcacatctaangacatgtgttcctatgcnnnattatatagtgttattaatgattaaactgatcttaacagaattcntagnannngnaccttgaagtgcatgtattaggtttatggtaaatgatttggttagcattttagtaacacttcattcagagtgtttttgtttgttttttnnnntaaatgtagggttggtnngaagtaaaaaacannnnntggttaatttcccatnnntgttttattttcttgaatcctttttttttttcagttatttgtttaaggagatttaaaaatnantgcactttggtcagaaaaataataaatatancttat

SEQ ID NO: 10425 - DNA, 522 bp, Canis familiaris
  misc_feature (1)..(522): n = a or c or g or t
aagaaggtaataaatcaaataagnnnggatcagaggatgagatgaaggaannnnatgagagnncannatctggagatgggccagtgaagtcagtgcncaaaagaagagtnnnaaaggaataaactatattcaagtatttttaattcctgagcgagatatttggcattctaaaatcagtgtgccagannngaacttgagtcagtntgcacatgttnnnaatatctagcaatgttattctttcagacacttattttagtctttcttttcaggaaaaaaaaaactttcaagttacctggtctttggatttagagtaaaaaagaggggcatgttacgtatcagatttaagagactaataccattagaagttaccaagttttaatagttggagnaagttttggtttgtacagagannnnnnnatatgcnnnnnctttnnngctgttggaaaatcagttannnnnatttccccttaaacagctatacaacaatattactggtagttctataataaaaatgagagtgtg

SEQ ID NO: 10426 - DNA, 585 bp, Canis familiaris
  misc_feature (1)..(585): n = a or c or g or t
ccaactgatccgcaggtgatgtgcttcatgcgtgtgtgctcagatgagcactgggctccgaaggagctcctggaagaatcaaagaatgaaaggatccaaagaatttttacagaatatcgagttctgataataatgtcttgagggagcatgtacacacacaaatgacctaatgaagaagagttttgataaccatgccttcgtgtacgggatccaagcttgatgttctgcgtgctgaaatctgctccaaagcaaattgtagttagccaagtttcagaatatattgctgaatatgcaaagacaaataatttccatgtaagacatgtgattgagggtaataagggaaaagggtaaagaccaggaattccccctttctcacctcttcaataaaaaatagcttagttaggctgtagttatctatggatggatttatctttttgcctactgataccttctttcttggggggtaagtcctaaagtcatttactcacaaagaaattaatggtggttgattcactgattatagtagctgttccagtgatgtattctgnattttaaaagtataagttgttaaattgtaaaaaaatt

SEQ ID NO: 10427 - DNA, 619 bp, Canis familiaris
  misc_feature (1)..(619): n = a or c or g or t
tngagctggtgcgagaacgannnggcctgtgcatcgcagatgaggtgcagacaggatttggaaggctaggctctcacttctggggcttccaaacccatggcatcctcccagacattgtcaccatggctaaagggattgggaatggctttcccatggcagcagttgtgacaactccagagattgccaactctctggctaaatccgttcttcacttcaacacctttggagggaaccccatagcctgtgccattgggtcagcggttcttgaggtgattaaagaagaaaatctacaggaaaacagtcaagaagttggcacctacatgctacagaagtttgcggagctgcgggatgaatttgagattgtcggagatgtgcgaggcaaaggcctcatgataggaatagaaatggtgaaagataagatgagccgccagcctcttccccgggaagaagtcaatgaaatccacgacaactgcaaacgcatggggcttctaattggcaaaggtggcatttttgctcagacgttccgcatcgcgccctcgatgtgcatcactaaaccagatgttaagtttgcagtggaagtatttcggtctgccttaatccaacacagggacagaagagc

SEQ ID NO: 10428 - DNA, 658 bp, Canis familiaris
  misc_feature (1)..(658): n = a or c or g or t
cattacaagatgaggtcgttgtatgctcactttcccatcaacattgttattcagantggnnctcgtgttgaaatccgaaatttcttaggtgaaaaatatattcgcagggttcggatgaggccaggtgttgcttgttctgtatctcaagccccaaaatagttaattcttgaaggaaatgacattgaacttgtttcgaactcagctgctttgatttagcaaatgataactgttaaaaacaaggatatcagaaaatttttgcatggtacctttgtttctgaaaaaggaacagttcagcaggctgatgaataagatctaagatgtccagcaacagaaacagcaagatgccagatgatttttcagacttatttgtgataccttaagaatgcaataaaaattatactgaaaaaagattatgctaagttgaagaagccagtcacaaaatgtattgtatgattccacttataagaaatatccagaataaacaaatttctatataaagagaaaaatcagtaattgcctagtgccaagagttgaagtgtgggaatggaaagtcactgctaatgggtagtaggcttatttctgaggtaatgaaaatgttctaaaaatttattgtgacaactctgtaaatatactggaacccnnngaattgtccacttta

SEQ ID NO: 10429 - DNA, 385 bp, Canis familiaris
  misc_feature (1)..(385): n = a or c or g or t
agggtaaaacaggcgannnnntaaaaacagaagagaacaagattaaagttgttgcactgaaaataacaaataatattaatgttnnaatcaaggatctcttccacattcctccttcttataaaagcacagtaacattatcctggaaacctgtacagaaggttgaaattggagcagagaggagccttcaggggaagtagaggtggccgaggctggggagcacgaggaaatcgtagtcggggaagactctactgaataagacatcgcattcttcagcattgtcatgagcttaatatacttaaattctactactcattggattgccggggatgtccctttaaaaggactgctgccttcagctannnnnttaatgttctttannnnnntg

SEQ ID NO: 10430 - DNA, 538 bp, Canis familiaris
ctctgtggatccggattggtgccaatgtctctaacttcacttttgctccaagcactatcatctttcacttgggacatgctgcgatgctggggctcatgtatgtctattggactcagctcaacatgttccagaccctgaagtacctggccatcttgggcagtgtgacgtttctggctggcaatcggatgctggcccagcaggcaatcaagaggatcgctgcagagcagagcagtagattggcaaaatataggacactacgaacagcacactagtgccagaaaggaggaaggaatgaatgaaagccaaaaatgaatatgaatatccagaaaaggagtcaagaacaattcacagtttgtaaagagaaacgaaaatttatttaaacaaaaaagtcagaattgtggttacacttttgcttgttgttttttctatttccccaacacagagtgaatacctatgaggcccaatactccgtttctttggcatggtgtcctagccagatgctgtgaatattcctaacttagctgccagctgttgcatt

SEQ ID NO: 10431 - DNA, 362 bp, Canis familiaris
  misc_feature (1)..(362): n = a or c or g or t
cttttnctacattacntnnnnntctannnatattggtataatcaaacaataattaagtagtacatcctttgctgctgctcggtgaaggtnnnaagtttgtgcataatagaacagactttggccttttgaatcactggcatctcagtctatcgttccaatgannnctgatgttttcctgttcattcatttaacaaatacatgtaaacatctacatgtttgtnnnnnnnnnaagtccttagactattccttagtattagaattgaaccactggtaggagttttaatttatctcagattagagccaccagaccccagcaatgcatagtaaagcccgaatgtcacactctggactttgagccagca

SEQ ID NO: 10432 - DNA, 516 bp, Canis familiaris
  misc_feature (1)..(516): n = a or c or g or t
ggcacacggctgggaagtgaannagctagaacccattctagcccntactccccagccccgttctcggccagagcnnnggcctgggtgttgggcgtcgggcgggtgcggacgccccggggcaggctggcaggctgcagcccggccccacgcgccgacacgtgtctcttaggacggagacttctccttccctctggagtccgtgaagaagctcaaggccctcggggagctccaggagcgcagcatgcggagcggcaggaagcgtggcggccccgcgctccccggagcctgcagccacctccagtttcccgaagagctcaggccgctctgcaaggagcccaacgccccggagatcctcggcaggctggcgtccatcgcccaggacccgaggtcgtgcgagatctgtgccttcgccgcctgcgccgggtgctaggacggccggctcggagcaccggagcaccgggcctggggagcgccctggggagcccgggccctggcccatccgaggagctgccggtg

SEQ ID NO: 10433 - DNA, 642 bp, Canis familiaris
  misc_feature (1)..(642): n = a or c or g or t
tgaagacactcaggtacccntgtgggtggcaaggaannagtgctttgtgnnaatagacagcgtcatcttgcccactgttgtcagcgagctgccttggggccccacnntccagcccgctcaagcctgtaggccgacatcttaactaagcacctgccgcaccccgggccagaaccacccagcaaagctgcttccgaatccctgacccatggcagctgtatatatgaccagtgtttaccgtgaagctgtcacctagcatttgggtagtttattacacagcactagaaaactcccacatagtatgttagagtgagcgtgctgaagcatgcaacagctcctcaaaaccagatatattaaaatttcctcaaagacaagatgactgttcagactgagataaataaagatgaccaaaaccttacagctctcaagcgaatttctcaccaactttaagaaaaatgttttgcgtttccaagcatttgggatcttaaaatcacaaatgacggatggcagacttcccaacaacacgtgccttacaggatgttgtgaggatttggcaggctcacatacttcatagcattgttaacagacttaacaacatgcctgtgccttcaactaaaatccaagtagtgagtcaggcactgggga

SEQ ID NO: 10434 - DNA, 435 bp, Canis familiaris
  misc_feature (1)..(435): n = a or c or g or t
anntctaccaacaatcnnaaagataaaaacttgcgccagagaaacacanattaaannctgcttataatatcattaggttcctgaaactggtggcaacatgacctgctaaattttctgcttggacctctttggttctctcccctttcaagtgagcaacaccacaatgactgtctaaagcatgccttatttagcctttcctgtaagggtgacctagccaggtacattttaaacaatgcttcagtgtagaaggtgtaaactatnnnnnnnnnnnngtgctgtgaatgttgctttttttcccccctttgttaaaatatttaagtagaagtgaaaaggtcctctgaggatcggattgtgcatgcgccattttttacttaatgcagctgttaaattggcaaagcnctaaattgcactgnngccatctagtgataacatttt

SEQ ID NO: 10435 - DNA, 652 bp, Canis familiaris
  misc_feature (1)..(652): n = a or c or g or t
cctcgctgncngagggtgccnnnnnnnaggggtacgggtgggtaggtcatgggagnnagtacgcgatgggagaagcctcactggacaccagctgtgtgnntctggcaggccatgcatcctcttggggcgttggggtgctgctctggaagacaaagggtttggctagatggggagtccccagaaagtagtgacccgaacagtccctcctctgggaattttgttacaggtcagattttgggtcctagccctggaggctctgattcctgggcagggcccaggaatctgtgttttcgatgaccagccatccttggctgcggaaagactggacaaggtgaactgtgaggtctccacagcttcctgagtcccttggatctaaattcagctaagcaaactaaggcaaatcagctgaacaaggccttcaggtgccccagccagagaaccgtttctgctcagctgtcatctgctccctttcatgcctccctgggctggcacaggactggatcctcctgggtgttgtcctccaggagtgcagggccatccagggtctgcctgccagcccagctggggactgggcagggacagacgcggcagggaggcatccgcagagcccggcacagcacgcagacctttggtacttgctgctttttgcaaa

SEQ ID NO: 10436 - DNA, 528 bp, Canis familiaris
  misc_feature (1)..(528): n = a or c or g or t
actgatcacaaataaactgctttgttgtaacacagagtactgcctggttcctgatgcagtcactgattcttagctctgattgatatgtatttgccccagggcacttgaatttgggctgtagttattttttttaatacaatagagacttttcttttaaactttaactttgtaaatattgaagtgtgtaattaaagccaataaaatatgggtttgaatattgttttagcttattatttttgatatgttttggtatcaaattataaggattgaaaactaatcagttagccctagaaacccattgatttgtaaggaaactgctaaaacaaagcaaaaggcaattgttagttcaagccagtctatttactttgtaagccctttgtacagctggacaagggcattcccatgataaaggtatgttctgttattggagcattgcttattaaaatgatggcactacccagagatgggcaaggaggaatgtgattaatttagtttcctaatttccaagttttaaaagagaannnnnnn

SEQ ID NO: 10437 - DNA, 567 bp, Canis familiaris
  misc_feature (1)..(567): n = a or c or g or t
gtgantatccccatagnnnctcaaaaacgtgnnnnngtcccaaaagttcaggctnnnngcatcttcatcagcaccatgcattcaaattaccctgtnnatgaagaatgcaannnnccacccacatacccgcaaaccctgggaaacagttctcgagtaatttttgctgtggatttacattaagaacattctttgcttttcctcctgctggtgtttttaagccacaagttgggaagacctctgaaaggcagaaggaagcctgtgatgaacggtcatgaggaagagccgggcagcctgggccagagaaaggatccatgtcagtccccaggatggttctgaggcctgctccgggcaggtgataggcacagcgggatttggagcaagatttggaatttcaagcagctgcttcatggctcttgggctccctaggaggactctgccataactcggtgcctaatgagcagcagtgattgagtctgtgttccctgcaagtgccatttcccctccaggagcggccctctgaagctgaagcctggctcagagcctgtctgccctctgtcttaaaccctc

SEQ ID NO: 10438 - DNA, 374 bp, Canis familiaris
  misc_feature (1)..(374): n = a or c or g or t
actgtagacnngcagatctgcttcctanggtcctgcttattgtccccctcccttcccaccttcccatgtttccaagtcagctttcctgcaagaagaaatcctgacaaaaaaaggtcttttgtcaagggtcaagagttgaattgggggtgagggaatggatgcatctgaagcaaagaatgcaggtgcccagatgtgctcccctgagatgtttctctgataacgtccctaatcatgccagagagacgagccatttgccaagaacttggcccaaggcttgagaagactgaaagggccctgccctgcctaacttccntagctcacacctcagctttgctaagagccacctgaggccccagctgaccgcatgcatgtga

SEQ ID NO: 10439 - DNA, 639 bp, Canis familiaris
  misc_feature (1)..(630): n = a or c or g or t
gttannaggcgctgtanaccattaaaggaatttatgctnngtcatgatgaagaacatgagaaactgtttgacctggtacgaaggatgttagaatatgacccagtgaaaagaatcaccttggatgaagccttgcagcatcctttctttgacttattaaacaaaaaatgaaatggaaattagtggtcttactatatacttctctagaagagattacttaagactgtgtcagtcaactctaaacattctaatatttttgtaaacattaaattattttgtacagttaagtgtaaatactgtatgttttgtatccatagcataattaccttgttaatgaggaagtatggtcttgataatgaatgaactataaaagttaaaattaattttcctttttgagattaattaccatttttaaagatctttggaatattctttgtgtccagtgataaatgtgattgatcttgtcttttgtacatggaggtcaactctttgaagtgatttttttgagtaaaaggaaatcttgactactttattctttatatacctcaaattcaaaacttttcgtaactttaaagttttttctgtaattgttgaacaggtaataagtattaactcccaataggcaggtattggaaaccaaaa

SEQ ID NO: 10440 - DNA, 621 bp, Canis familiaris
  misc_feature (1)..(621): n = a or c or g or t
caannaattgatccttgctcaactgcgaaaacttaaggcccaaaggacccaggcccgggaactatcgcaggaaaacntagtcaaactcaccgtggaaagtaatgccgccctcaaggccctgagaaagatcgttgataagggtgaaaagatcctgaaacttgctgaaatatgtaggaaatttgaaacagaggaagaaaaagtgctgcctttctattcatcagtattgactcctgaggagcaggagaagatagaagaaatctacccagaggagcttactgaggagctcgcaaaggtgatagtgaactacacagggatggagaatttctggaaaaggtacaacaaagtgaaactggagcagctgagcctccaatatagacatgcccagttgttagaaatcaatgggaagttgcgggagatgctgaagcagtacttggatggcatctcagtgagtgacgaagtgctgagccagctcaacccactctttatcatcaaccatcgaagtaacttaccccagcctttnnnnnacctaccacccagccaggtgnnnaccacctccaaccacttacaatatcattgaagcagcccatgtgatctcccacatcctgtgataggagaatcttt

SEQ ID NO: 10441 - DNA, 614 bp, Canis familiaris
  misc_feature (1)..(614): n = a or c or g or t
gggctgtgaccaactatacangtggtnnaacagtngaacagattgtatacctcgttcattgtggcataatagaaccattgatgaacctcntaactgcaaaagataccaaaattattctggttattctagatgccatttcaaacatctttcaggctgctgagaaactaggtgaaactgagaaacttagtataatgattgaagaatgtgggggtttggacaaaattgaagctctacaaaaccatgaaaacgagtctgtgtacaaagcttcattaaacttgattgagaagtatttctctgtagaggaagaggaagatcagaatgttgtgcccgaaactacctctgaaggctatacattccaagttcaggatggcactcctgggacctttaacttttagattgtacagctgagacagaaagttgtttgttgtgtactgtttggtagaagtttgtcttactgtttctctactaagaactctttttaaatgtgttttgttattgtagcactttttacaacgaaactatacttgaccagttctgaactgtacaaactgtatgaagctcctcctctcagtgggttgcttatttctatgtggaatcttctatcttannntgtc

SEQ ID NO: 10442 - DNA, 526 bp, Canis familiaris
  misc_feature (1)..(526): n = a or c or g or t
cccgaagctgtnnctccagaccannnngagtatagcacctcctctcccaagccccccttgacacctctcagctactccagggcactgactgctctgaggagagnnaagaaggcctgctgggggtttccacagncttctgctatttctcgccaacactacccgggactcttgctatctggttccaactccagacaaccactatgccaggcatcagacagcccaggccatctgaggtaagactgtacctcagcagagagccccaggcaagtggctgcagggacaccggtgccacagctcctgggccaacccttatgcctcatactggttgccaagagccctgagccaaggcaaggatttgccaaaaacattctgggggtccagccagcgcagggctgcaattccctgcccactctcagaaagactatgttcatgtgaagatttctgattccctctgctgtggtggctacggctgcttctgggccagaagagccacagctcccaagtattttctacaggaccacttgag

SEQ ID NO: 10443 - DNA, 580 bp, Canis familiaris
  misc_feature (1)..(580): n = a or c or g or t
tatgctgtgtagcacccagttaagtttcgattctatgataagtataccttcgacccgtttcacatgggagcttcnnncccctttgggcccaactcagaaaccagaaccagaaaactaatctcactcaggctggtcaagccagaccactgcagaaataactggaagtaagcccttaattctgcctgtttctacttctccagcagtactgcatctcctcatttgtcctaggtaatggcctctgtgcctttagcccagcaaagtcaagctacgggacccctcaggatggtggggattcacactgggtttgtggactgttgtgttggaagccttagttacaccatattaagcctataattagactctgattggatgtgatttctgacatttggcacttgtcgaaatgtaattttttttggggtgcagatgattcaagtcttccctgtttatttggtgcaatgaagtatagcagataaaatggggaaagggaaattatcacctttaacaagattaatttttaaatgtttttatatatatttgaattgttaaattggttttgnnnnaacagactttcacccttaaa

SEQ ID NO: 10444 - DNA, 564 bp, Canis familiaris
  misc_feature (1)..(564): n = a or c or g or t
aggatccagcacaacctgannagtcactgcatcgaggtgtacccacagaagtccctcgatgaggacaccaatgaccggatcnnnaacagcaaaatccgggaccggatcccctttgccgtggttggggctgaccgagagcacctggtgaatgggaagtgtgtcctgggccggaagaccaagtggggcatcattgaagtggagaacatggcacactgtgagtttcccctcctgagggacctgcttatccgctctcacctccaagatctgaaggacatcacccacaacgtgcactacgagaactaccgtgtctgcaggctcaatgagagccacctgctgcctcaggggcccggctgggtgaacctggccccgacccccgcaggccgcccggccaccccccggtccttgaaggtgtgccagcaggcccaggacgatgccaaggacgaggcgtactgagcatcggggcacccaggtcctcaggactcctgtgtccttggcagcccccagcacacacctgtgtaccagagcatgtattaaagttcgacgttgctttttttttgaaaacct

SEQ ID NO: 10445 - DNA, 537 bp, Canis familiaris
  misc_feature (1)..(537): n = a or c or g or t
tntgcaagggggggggggttatgtgctgccccaaatgaggagtgttgcttctttactgaccactcaggaatagtccgggaatctatggcaaaagtcagaaaaggtttggctagtcgtaaacgggagcaagaacagcaacaaggttggtttgaatcatggtttaatcattcccactggctcactctgagaccagcctgcacccatgattgggtccttccttaggtcctctgagaggggaaaatgtggaggtggagaaaaattaaggccattccacctcaagtttagcattagcacaagtacagccatcttaggcccctgggaataagagctgaactttacaggaaaaactgcagaatgtcctaggcagggaatcccacatcggaaagacaataaagctcagaatgccctcagcagagaatcctgtatcagatcttaagaaactccccaccctttcccccatattagaatggaaaaaattcctccaccccttctgaagatcccctagaccagcccataaaaaacccagctataacccaa

SEQ ID NO: 10446 - DNA, 638 bp, Canis familiaris
  misc_feature (1)..(638): n = a or c or g or t
gctgaacaaaaaataanngcagatattttacgaagcttgagtactgaacagctattccggttattatcagattcagatttgaatgtgctgatgaagacattgggacttcttagaaatctcctctctactcggcctcatatagataaaataatgagtactcatggaaagcaaattatgcaagctgtcacccttattctggaaggggaacataacattgaggtcaaagaacagggtcattcacatgtgaaactgcagcttgccgctatgttttgtatatcaaacctcatatggaatgaagaggaaggttcacaagaacgccaggataaattacgggacatgggcatcgtagatattctacacaaactgagtcagtcaccggattcaaacctttgtgacaaggcaaagatggcactgcagcagtacctggcgtgatgggagcgccctgggcacctgcaagcatcccacatccttgttaaaggaagtacaggaactagcctcatttgattccttctatttgcacaagtcaccttggactgcagggagctgttttgcaaaagcaatttggtaggcttagatctcaaattcatcttgagaacatnnnnntgaggtagtaatttnnncagaggactattgtgttt

SEQ ID NO: 10447 - DNA, 390 bp, Canis familiaris
  misc_feature (1)..(390): n = a or c or g or t
tttaaatcactcnnncattnnnnnnnagatgagatgcagggatcttnnggaagatctnnaagttagaaaaatagcctttgttnnntngagattgaaattatgcctatatatgtatnnacacctaagaatgcatatnnntctnnnactgacaaatgcggagcatgtgnnnnnncnnaccactctgtaataaatcngcnnnnnnggaggagnnnnacgttggctggagatttttatccatttgaaaatgttnncattcannnanggaaagccagagnnnggcagggagacggttggatccaagtgcncnggcatttcattgcccgctgacgccatcaatgaatttagaggccagagagatggccacgttgattcatacagtgctgaattaag

SEQ ID NO: 10448 - DNA, 645 bp, Canis familiaris
  misc_feature (1)..(645): n = a or c or g or t
antgctatncngcangaatcaaaattcatccacatgagtactcatgtagctctggacctgnctctctttctctaagggcaagacacaggacaccaagtgttttgcaggtgatcctacttatttaaagactgctactgaactttacttccaaaagggcacggggtgaaggaatggttgttgaggcctccttttatccatcccccaccctgaagtggtggttagtatacggtacttgaacagattaaatttcaagcaaactgctgacagggctgggccaggaccaaagtacctgaattctttttcctgaaattctttctccatcttaaattcattagtccacctcatctttcaattcttctgtagttaccctacatggatacattttaaaggaccacttgcctttcattctgagttgaagagctacccaaggtcccctgagaattatatcccaatgccagaaatgacagttttgtttatgaccaggtcaccacattagagtcccaatgtccatgagctgaagatctgatttcagacaacctgatacaagtttaccagccttctttgctatagtgaaggccactccagccaccacctaggagggcagagcagtttgagcaattctatcccaaaagcaaccacccttct

SEQ ID NO: 10449 - DNA, 576 bp, Canis familiaris
  misc_feature (1)..(576): n = a or c or g or t
acagccacatgaccnngcactccatttcccctgctgtagaacannnnnctgcaggnnngcagtggtnnnnnnggcagcccagcagttccagggtctcccagctgctccnnngagcagcnnngcagactccaccctttcctgnaccgcccttctgtcctagaggggtcaccctgaccggcctgccctgatagggcctggcagtgctggctctgccccttgaaggggctgtgagtgaagcaggagggagctggtctcctttcttcgggccccccaggacccaggccttaagtccccagttgggggtgagggctttgagactcaagcccagggagcagaggaacagggcactgaaaggtgacattagctcagcatgtgactcggtgacagaccaggctcgagagggctggtgtacgtgttgttgttgtgggtttgttgttgcacattccaggatatcagtattttaacaggttnnaagtgcctttctatcgtagcttatgtttttcctcctcttggctccattgctgttagcatagagtttaaaaaaaaaaaaagagataagctaatgactataanaat

SEQ ID NO: 10450 - DNA, 610 bp, Canis familiaris
  misc_feature (1)..(610): n = a or c or g or t
gggccccgggtngnctgcacgtgcaaggtagtnacggtagctatcccctccnngncnnnnnggcntgttcagggtgnngtgcactnntggtgcacagtnggctgcagggtcccatcccacgggtgtgcctgttgtccatcacgtcccccatggttggtgttgatggcatttgttttcaggcaaacagaccgtcagtcttgtgtgccacccacagtgtatccctcccttaccaccgatgtgactgaggttggcttctgtgttgacctttataaaaccctcaaatcaagttgctgtaattagacacttgcttctgtcttgcctcctgtctgcagctgtgaataatcatttgactgtgaccgtttgccctcacaacagccagatgcgccatcgtgaaccaaagcttcgtgtacacgtgttagctagaggcagcgagccctgctgcagccttcccctgtccttcctttgtaccccccccacccgtgtgggtacgagtgttgtgtgcacnnnnnncatgccgtgggggcagagggcagggagagcctgtgctaatgccacccacctcgccactggccatcgtgcaccttccaggtggtggctaaactatggctgt

SEQ ID NO: 10451 - DNA, 579 bp, Canis familiaris
  misc_feature (1)..(579): n = a or c or g or t
actgacacanntatgatccgcccactgcctgtganacccaaacccaagactnngcagagagttggggcgaagacagtgctccctccnnnnnnngccaagctggacacctttctgtggtagtgagaacagtgagccagatcaatatccagatatatgcctctaacttataggtcaggactggctcagcagggggcttggggggcatggcctatcttccaagacagccccaagggcaagtgtaaacaaaaaggtgagggtggggcccaaagactgctttcctgcacttaccctgcccacccccaccatactgggtctgctataccaggcctacatgtgactgctgatgtgagaccagcaggacttcttccttgtcaaagtttcctacttatagccagatatggctgcgtgcttctggttctccagactaaggtcttttgttgactgtgtgaaccannnnnncttggggcttcttgggtagtttcagcttgcccaagcttgtgcctgcttctgacttgctgctgggcatggccagagctgagcaggatggggaatgaggggatggtggtggggagaggatga

SEQ ID NO: 10452 - DNA, 525 bp, Canis familiaris
  misc_feature (1)..(525): n = a or c or g or t
gtggtnnngcgctggctgaannagctatacgaccatgctgannccactatcattgtcatgctcgtgggcaacaagagtgacctccaccaggcccgggaggtgcccactgaagaggcccggatgtttgcagaaaacaatgggctgctattcctggagacctcggccctggattccaccaatgtagagctggccttcgagacagtcctcaaagagatcttcaccaaagtgtcgaagcagaggcagaacagcacccggaccaatgccattgctctgggcagtgcccaggctgggcaggaaccaggcgctggtcagaagagggcctgttgcatcagcctctgaccccggcaagcaccaaccctgcccccactggcttccggtgccccatcaccaccccagccccaggaccctttcctgctctgtggttccagatgtcagagacactggctccctgctcactgccccacagagctctatcttcatgttccctgcaaaccccctcatttctattacctgctcccccccccg

SEQ ID NO: 10453 - DNA, 485 bp, Canis familiaris
  misc_feature (1)..(485): n = a or c or g or t
gtttggcataagtggccatgccctaactnctcttgtggctattccactcctagatatataccctagagaaactgagacatatgtgtcaggacatggatgtgaaaatgtcataacaacattgtttgtaataggaagaaaaggaaaacaaaaacaaactgggaagaccccacctgtccttcagtccactggatagattccgtggcttgttcctacagtggaattgcacagaagttgaactgagctatggctacacgtgtgaacacggatgaatctccgtggtcgggaaagcaaggtgcagaagagtacatccannatggttccgtttctgagaaagtcaacaccaagctgttaagttaaatctatggtaaataaaagcaaagcaaggaaatgattaacatgaaattcagtgttaacctgttctatcggagggagaggagaccatggagagcaaggaacaacagccttcagaggaactgctaatgatg

SEQ ID NO: 10454 - DNA, 464 bp, Canis familiaris
  misc_feature (1)..(464): n = a or c or g or t
cccgannnccggggtatcgnnaagaagatcttcaaggcggcgggcgtnnnaaagagtttccaagaggcacagcagctgtgtacgcaggcggggggacaggtggcctccccgcgctcggccgccgagaacgaggccctgcagcagctggtcgccgtgcagaacaaggctgctttcctgagcatgacggacgccaggaaggagggcacgttcacctacccctcaggggagcccctggtctacaccaactgggccccgggggagcccaatgacaacggcggctcggaggactgcgtnnngatctttaccaacggcaagtggaacgacaaggtctgcggggagcagcgcctggtggtctgcgagttctgagcccggggggtgcggggggcctggcccgagcggcccacacctgcatgcgcccggccggcggggaggccaggaggctggccctgcacgccgctcccggc

SEQ ID NO: 10455 - DNA, 562 bp, Canis familiaris
  misc_feature (1)..(562): n = a or c or g or t
tctgcagagccccgtgtgcaaggnnntccggcatgtcaaggtngacacgctgagtcagnntgaggccctctccaggatcttggtgccagctgtttggtgtaccgtgggncgtgactgaccgccttcctgaggcctttnnagccacctgccaaccccgcccccttttctagaaactttggtacacaagtggtcttttcaatctacttccagataagaatgtattttccctgtttgaaatgaaggagcagccccttcccccagccttccccggacccccacccctagtggcagagcagtctgagcggctggagccggaggacagcaccccaccccccggccccccagcccagtggccacgcatgaccctctccccctaccccttaccacccctcctctgcagcctgccctggcctcaccgggaccggcccctttgctggcccctgcgtcacaggcctggtcaactttcctctacctggtaggagccaagaccctgtagtgcccaacctcggcctgtgcccagctgcacatggcaatagagcccacgtagccagtgccatgcttg

SEQ ID NO: 10456 - DNA, 663 bp, Canis familiaris
  misc_feature (1)..(663): n = a or c or g or t
ctttgatgnnnaaactcactcagtnnagctccctccagtgantagtgcctcatttgctctgcgttttcttgagaccttgtgtcatagcttgcagtgtgataaccttttgagtagccagccttttagctcttacagacgtaatactcctagtcctgcagagcacgataaaaataagtcagtgaaagaagatctaacagaaaaaagccccaagcgaccttctcaggaacctccaccttatgttgttcctgtgtcacctaagcttcccaaaacaaagatgcatgcctctacagaagaactactgtctatagagggaaatggcatgcccaaagaggaaaagcttcctgaagattccaagaactcaccactaaatccaggaagttctttaagccccagcagcagaaatcccataagtacctctactaccatcactaggaatttttctcaaagtgtgccaggcacctcaagttcaccactagtggggaccaaatctaccaagagcagtcaccatgaagttaaattccaaatgcagaagaaaagcgaaggaaattgatggaaaggccctgctactcctcaaaagtgatgtgatgatgaagtacatgggtctgaaactggggccagcattaaagttatcatactacattgaaaaacttaaagaaggaaaat

SEQ ID NO: 10457 - DNA, 70 bp, Canis familiaris
cctcccttcctcccttcaatctctccttctacttcttcctccttctttctctgccccctagggaaaagta

SEQ ID NO: 10458 - DNA, 500 bp, Canis familiaris
  misc_feature (1)..(500): n = a or c or g or t
tttcaaaaagtttnnnnnatgtnntaaggaaggagttggtctaaaaagataagtcactgaaaagaatgatattggcctatttacatcaaaggtagttaagaagcnaaaagnnnnnntaaatgcaaagtttggtaacccagaagatnnnnnnnnnnnntaacctataattttctaaagtcagtgcaattatctgtttataagaagctggaaaggaatgtaccttgattgttttaggaataatttgtgtgttgcaattttaatttatttaaaacctgtctcctgtgtttgtcctaagagaaatgtttcaacaaaacgtgctctgtgtttaaggtatgtttaggcagtagttagcagttctgaaaatggaaactagaaatgtttattgtgaggtgttttgcagaatttctgttttgtgagatactatgtagttccacgtcagcctaaaattgtaaattctctgtagattgtcatcctattcaaagcaggtgccattatttttt

SEQ ID NO: 10459 - DNA, 658 bp, Canis familiaris
  misc_feature (1)..(658): n = a or c or g or t
gagnntgnagcgactnnnnnncgaacaccctgaagatgagactctgctgataaatgtggtgtgtggaattctctctggagtcgtatcctctaccatcgctaatccgactgatgttttgaaaatacggatgcaagcacaaagcagcaccattcaaggcggaatgattggcaacttcattaacatttaccagcaagagggagcaagaggactgtggaagggcgtgtcccttactgcgcagagggctgccatcgttgtcggtgtggagctaccggtctacgacctcaccaagaagcatctgattctctcgggcctgatgggagacactgtgtatacccacttcctgtatgtttgtagatttaaaaaataacattttaggtatgcatgaggtcagggtagcagtttgctacgactttattagagatttaaaggtttattatcaaagtattacagtctcatatttgaaaaattacaatttagaagtgaactgagaagaagcaaaagcccttatctgcttaaacaggtgaccgctttcaacagcttgtcttttcaggcacatgcaaatatgtataaaagtctactctgtgtacttagcgcacaggcaagatcatgcttagtattctcttacttttttattttaattttttagctttattgcggt

SEQ ID NO: 10460 - DNA, 387 bp, Canis familiaris
  misc_feature (1)..(387): n = a or c or g or t
cgcgagcgctgttcnntgannnnaggcctccggctcgnnncgcagcccttctcgccgcagcgcagcanggggtnnnngccccggggctggcgcctggaggaccgcacgtggtcgcagcgcgctccactcgtggggccgccntcgcccacagggcggggagcaggnnggcccccgagcccgaccgatgggagcggctggacggccgtgcagtccgggnncgtatttatttgttcgtgtgagtgtgtnngtgtgttcgccgggggcgggggggggggggtgtcccagggtcccagggtcccaggagtgtcccgaagtacgacaccgccccccaggccgagggccctgggcctgcgggcgggggagctgggatngccgctgnnccgtgcg

SEQ ID NO: 10461 - DNA, 525 bp, Canis familiaris
  misc_feature (1)..(525): n = a or c or g or t
cccnnggctctttggttggctcttatgctaagggccaaagcaggtacccnntgagaggggtggggcactatccttttcttttgggaaactttggctgctgcagtcattttgccctcatctcaggagtgttgaaccaaggtcatcagtctctaatcagcctcccacctccacccctatctgtttctctcccgaacccccttatccccacctcatgcttcctgactccactgggtccccagcccagaccctgctttcattctgatggccttaactgcactggaggcagaacttcccaggaggggaagggacagactagtggctgggccaacttctgatcattccaggtagaggagcttcatctaacactctgtgactgagcctgtccccacgacgcttcctgtgctgcctgcctcagcaaattcccatgggttgtaaaggcagcaggcagggacctggaaggtggagctgctgacaggtgcaagggtccagtcagacccacaggccctgctctagagatgtcttgta

SEQ ID NO: 10462 - DNA, 569 bp, Canis familiaris
  misc_feature (1)..(569): n = a or c or g or t
aagtcaagtacannntactatgtttaataaagttattacatttaatgcatttattgcatatataaatatacctgaagaggctttaagtcttctgatatttgatttttgaatgtgtttctatgtcagtggtgcctttaggcaagaaccttcaaaattgatcattctctgtttgggttttctgatttttgggggggtaacctataaactatttagaaactatcactactaacgtatagttcattcacctaaaaattgattgtatgatttaaatatagcacttagctgggcatttcttatgattagggtgttctgaatagttgctgaaaaaattgtgccattgaccaatggatgcacttggttagccttaatttaaaaaaaaaaattaaaaactttcttgaatatttctgttcgctcattttaagtttgtgctgctggtgtttggaaaaaatcaaacagttaagtgctaccagaaagtgtatcaatttttaaaaaaattaagaacaatataaatttcacattctaaaattttaattttgtgcaatattttcatttaatgcatgtgtatttga

SEQ ID NO: 10463 - DNA, 378 bp, Canis familiaris
  misc_feature (1)..(378): n = a or c or g or t
ccacctcttcccnncgatgccaaggcacaactaccgcagggtggctccgcnggtcaannngctgtgcgccaagcnnngnntcaactacgaagtgaagcccttcctcnctgccttggtnnacatcatcgggtccctgaagaagtctggcgatgtctggctgnaagcctatctccaccagnnngnnnagcacccagggcctcnnnnnncaccaagctggcccaggcaggcttgacacctctgctctccctctcccccctctcctttgcctaggggccctgcccacccttctggatctgctgtcttcaccctcacctgtctgcttggcagccctaaggccatagcttttggccaaacaggaacagggctagggggatggta

SEQ ID NO: 10464 - DNA, 534 bp, Canis familiaris
  misc_feature (1)..(534): n = a or c or g or t
agagagaccaaaagcnnnaaacgactngnnnaaaaagattcagcttgttatganngtgatagaagcatacaganncaaggatgaaagatacgatcatctggatcctgctgatgtggaaaaagttgaaaaatacattagtgaagccatgagttggctgaacagtaagatgaatgcacagaacaaactaagtctcactcaagatcctgtggtgaaagtttcagaaatagttgcaaagtcaaaggacctggataatttttgtaaccccatcatttacaagcccaaaccgaaagtagaggttgctgaagacaaagcaaaagctaatagtgaacacaatggaccaatggatggacagagtgggactgaaactaaagcagatacaacaaaagacagctcccagcatactaaatcttctggagagatggaagtggactaagtcttaatttcaccttcacataattcaaacagtgcaagcaaccacaaggtccattcttccttttacatgtggtacacacaacatatgttcaatnnnnntaa

SEQ ID NO: 10465 - DNA, 648 bp, Canis familiaris
  misc_feature (1)..(648): n = a or c or g or t
gcgcccaccacgccaacaccntgccatccacggcccntgcgacctggcctggacatcnnagctccactctgagnntncgggaggnnagcccgtgtcctggattcagcctgacgccccagtgaggcctcaagaaccgtccacgagtgggcagcagccacagcggcagggcctccagaccgcaagttccccaccgtggccccccgccaccaccgcctcgggaggggaagcctggcttcctgaggctcatgcatttgtgcagggccacaaggacagcaaggccaaggggccaggcttccctttcaggtggagggcccggcatggtgagccagaccagtggtgggccggtgtgcccagtcggtgcctcggtgggccataaagatgcccctcgcggcggggggggggtgcaggctgcatatcccagcacccttgtcctcaccccagacttccccttggcacaaccccaggaaagatgccagtcactgtggctgccgtcttagtgctcgctgtgggccaagaccccgacatcgtccctacagaacctacctatgggtttgatcgcacctttccaggggtgactatttgagcaaagctggtctccccagcagaacagtaagcaacgtgggggcggggctgtgtctgtttcagcca

SEQ ID NO: 10466 - DNA, 513 bp, Canis familiaris
  misc_feature (1)..(513): n = a or c or g or t
agtgggcagcaatggnctgtgcctccctagcaactagtttcnnnnntacagnnnaagcnnnctgtttttcctttgataaattatctctcccctactcacaggcnnngagcagtgccaattggacaaggatggncncatgactctgnnngggtggctcagagtccagttaagactcaagttagcactatttgaaaagnnnggctccctctcttctggatgaattgttggatgtatagagggtggaaccccaaatggggctgccaggaccaccatgtggagacacctgcctgggtataaacccaatacagggaagaagagaagagaagaccactccatacatctctttgtnnntggatccaaccatgnnngaagcggacttccagacttgtcagnnnnngagccaacaaattccccctccatttgtaaacttttaaaattnnntttttggcttagnnnggtttgaatgggtttctgtcacttgcaacactaaaagggnnnactaataacacccaa

SEQ ID NO: 10467 - DNA, 438 bp, Canis familiaris
  misc_feature (1)..(438): n = a or c or g or t
aatgcannaggagtgcccagactaatcttctcatcacctttgcctttctttgtgtctgtgtctaggagtgaccgtgcaagccctttccacagtccccgtcatgtttagttactgggtgagtgtgaaacctcagaccatctccttggtgggcgaaggctcacatccagctcactagtgagtagacaggtatctcaagtcttgacattgccccccaattctcctcccctttagagatcaccagggacccccagcttttcacactgcagtgtcccctcccaggctttcttcccaatcatgttcttgctctagacccgcacggtccggaacaggagccaggagccacgtgtcaatgtgtggattgcatttccattggacagggcaattctagactcaatcttaattccatcagaacttacctgtctcttgggatccccgggt

SEQ ID NO: 10468 - DNA, 663 bp, Canis familiaris
  misc_feature (1)..(663): n = a or c or g or t
ggactgatgannctgatgcagaggagagaggnnntgaagagaattacagcaggnnagaggcacccaacgagttctatgatnnagaccatgacaacgataaggaaagtgacgtggagatttaagagcagctgggcttgctgtgtctcaaggaactcctttttacttcttgtttgggcaggagggaaaaggtgtggcacctccagccctggatggtcaccttctgggcttttactggcgccagaaaacggtttggagaccacatctggtttttgaaccaactatcccctttcctcttctttgcaaggcctgacgatggtactatcggggactggatggggacaaggatgacttcctctaggacatcttgggcaatgggccctagaggcctgtcccagccattttggcccccttactccttccctgcttccctccaacccagagacttttagggatgaaggtatagacagggctgacattgtctctgattttctcctttcctgggttctcctattgcaggccttgtttccagtgaaggtgaagagtgagggattttagggggctctggctccctaacaccttaaccccagatgatggaaattacggttttgagtctgggtaggatgtgaaaatgtcctgttctaacttttggctttatgtccattt

SEQ ID NO: 10469 - DNA, 457 bp, Canis familiaris
  misc_feature (1)..(457): n = a or c or g or t
cgggcactgtctttacacannnatccacccaggacatggggcaggagnnagannaagaggtggtctgcccnnncgccttgaggaactgggaattgccctgcacagctaacataggccagctcgggctccaggtgagtgcaggggctggggctatctgacacccagggctctgatgtggcaggaagaccccgggtcccagaagccagcctgcaactcccctgggctcccccctagacacctgctcccacatgagctggattcccctcctccccagacttgcccccatggccctgaccctgcctgggccagatgcagagttctgtgcacagatttggaggaatatcagaatagagccttcaggggatggctggtcgcccagtggtttagcgcctgccttccacccaggccctgaccctaagagtcccggtatccagtcctgcctcgggctctctgcacg

SEQ ID NO: 10470 - DNA, 538 bp, Canis familiaris
  misc_feature (1)..(538): n = a or c or g or t
aaacananatctttcttccagggttgatgaagaaancttacaagttttcatttgagattatcggatttctaaaaggctatgctatgtcttttgctatttgatcctactccttgtaatactttctctcagagaaactgggggtagttaaaaaagtataaaacaagaggaaataatacatcatggaaaaacgaaaataggggacagcattgaatcattttagaaataagtacattctcaaaaggttgtaccttcttcaagcctactcactttgtaattttgcccataactcaaaactcttgaggaaaatgactccaagttcacttcttaagacacgatctttctgactacaacttgttaggttttgattccgtttctaaaaggcagagtntnnnnctttagtattatagtcttgcccagcatctgcaatgtatgatactgatcaatgagcctcaggcacaattcttcagctttgagaccatgaaacaatcacataatgaccttacaccttgtcccctcattccaaaattattgccgctga

SEQ ID NO: 10471 - DNA, 550 bp, Canis familiaris
  misc_feature (1)..(550): n = a or c or g or t
catctgttgtagtgaatatgtgaagggnnaggtggcaactgagctgccttgccaccactatttccacaagccgtgtgtgtccatctggcttcagaaatcaggcacctgccctgtgtgccgctgcatgttccctcccccgctctaaggccaaggctctttattcctggtcagatgattttccccatctgaaatacacaatactgcaggagccctctcaaaattaacaattgaaatgaaaacgaatcagtcgattaatccacacctgtcattccttgtggttatttccaatgtgaaagcggttgcatactatgattgcattaaaaaatcataactgtctcttagaggttagaaaaggaaaactaaactttctaaatgctactcgagattacagtaaaaacatacattttctaacctgaaagctgaactaagttgcatttgttttcttcagtagaatatgttgctgttaactgttaacgacaggtttatctgtcaaatatgtccagaaggcatcatcatttctattgcatgttatgggttaatattcctgtaa

SEQ ID NO: 10472 - DNA, 661 bp, Canis familiaris
  misc_feature (1)..(661): n = a or c or g or t
aggnacatctctcgcttnntnnagtgtnacccagtgatgatcgatgccatcaangtgnctgctgctcacagggcccgctacttctggggcaacctgccgggaatgaacaggcccgtgatagcatcaaagaatgataaactcgagctgcaggactgcctggagttcaataggacagcaaagttaaagaaagtacagacaataaccaccaagtcgaactcgatcagacaggggaaaaaccaacttttccctgttgtcatgaatggcaaagaagatgttttgtggtgcactgagctagaaaggatcttcggctttcctgtacactacacggatgtgtccaacatgggccgtggtgcccgccagaagctgcttgggaggtcctggagtgtgcctgtcatccgacacctcttcgcccccctgaaggactactttgcctgtgaataaccccccaggcacccagagcccagtagcactggggtatgtggggcagagccaggacccaataggtacagcccaagctctgcccttcctctgctcaacattgtggggtcatgccagataactttggcggacagtgccgcgtgacccccctcctggcaggggcagcctgaggtgccacctccttgtgcacaattcagacctggctgctaggagcggccaaaca

SEQ ID NO: 10473 - DNA, 645 bp, Canis familiaris
  misc_feature (1)..(645): n = a or c or g or t
atggactgtcagctgttaatctgnncctgtttnaagtgctattaccttnctcagttaaccagaatcttgcgttaagttcgcaaggcattgatggatttttaaccaataagtctttgtttttgggaaaaaaaaatcaaaatcagtactattttatatggaaatgtgncttgataatattacctattcaatgtgtatttatcagtacctcctgtcaatcaattacagagnnnaatgattgtcactgggtgtatatgtatttactctctattattgcgcatagaggtggtttcggctccagaactccagccactgtatttctacattgtgagtcatttacttcaaaagagaaaaaaaaacaaatttgtagcaacgatgatgtatcacaaattttaaatatctgtctctcttttactgagaaggaatttttgaaaattctatctacctagaatctcctccccccccccaaaaaaaggcagatgcctttgggaatgaagtaaccggtcccatttccaaaagttcttcaaaaggacgctgccatggatattcctaaatttctgaaaggttaatcctcaagagacaaagttcaaaaaaaaaaaaaaatgcactcagcaaacactaaatgttntgctcaaatatgaattttta

SEQ ID NO: 10474 - DNA, 493 bp, Canis familiaris
  misc_feature (1)..(493): n = a or c or g or t
tcaaaaagaagctnnataaacagggnnaccaccaagtagaggggtttgtgcgggacatgcggctcatctttcatnnccacaggatgtcttacaagtacaatgactttggnntaatgggacttagactggaagctgaatttgaaaggaaattcaaggaagtgtttgctattgaagaaacaaatgagagcagttcactggcgtagtggaggctatttgtactctggaaaatccctttttggggcagaattttcatcccccagctgctgtgaggattggctgttgctgccaacccctccccaacatatcaccttctaccaatgccagcttcacctggagattatacctcttgggcctaggggctggcccctagtcccaaggatggaccagcatgtggtgtgtgattcatgttcctacactcccaagatcaagctggagccagtctccagctgggaccnnnnncatgcttggctttnnnnnccacacgatcctgctt

SEQ ID NO: 10475 - DNA, 495 bp, Canis familiaris
  misc_feature (1)..(495): n = a or c or g or t
ttcagcttggggtgggtacaaactccccaacccnnnnnatgcagctggtgaacagggttcccgccatttcttccagccccactggtgggttccccggccctcttgatacctaatactccagtcaaatggctagattaatgctgctctagaggctaactcaagtccttgacatgtttcatttacaagtatgtggattatttattttaggagcttttcttttaaagggccaaatagccctacagataaatgagctgctgggctgtgtagaaaatattgttcaaatgttgccaaataattgactttgtaagggggatattaagctgctgtttataaatctgaatgtcttaaaagcattcttgcttgctctctctgttgtagatggtgtcttagcaagtcctgagtttttccaatgaacccaattttaatatatggtatttttgtatgccaaactggtgtcttgtcctttgtatatgtggtaatgttgattttatgact

SEQ ID NO: 10476 - DNA, 579 bp, Canis familiaris
  misc_feature (1)..(579): n = a or c or g or t
tgtnctcaatcaagctatngctgttataaaagaaaagattgaggaaaagaggggnnnnntcaatgttcaaatggagnntaaagtggtcacagatacagatgagaccgaacttgcaaggcagcttgagaggcttgagagagagaatgcagaagtggatggagatgatgatgcagaagaaatnnaagccaaagccgaagattaactttgtgggaaacaagagtccagtttaaggaacacagagcagcccttcctggctgtaaaccctagacttgaaagttttccagtattgaaaacttcaaagctgaatattttttatttccaagtatttaaatgttccaacagaccaaaacgtgatatgccttcctaaaagtcagctgttttctcacaagagctccaacattcagcagtttttaagggagtgggcctaatttcactagagacaaatctttaagaacagtcataaaattgggcttgtggtttccatttctgatgtctccagattggcacccctttgtagttcagtgcctctatgagatttaccaggggcacccaaagcaaatagcctcaatctttctatat

SEQ ID NO: 10477 - DNA, 705 bp, Canis familiaris
  misc_feature (1)..(705): n = a or c or g or t
ccntgtccgtcaggtatancttnntcttcctggatgcatacatctgtggnngatgtnnatnnaaattcacaaaatgaggagttatcagtggaaatgaaaaatgctctcagtgagaccagnntcttgctcctcaatggcaataaagtgcttccatgtttgaaagaatcattaagaagaaattcagcttccgttgcggctcagagcaagactctggatctgttctgtgctcctgcagaagagtatttggctggggtgtcctgtggtgtgagggactggctgggaggggggccaagggcaatcaacagccacagaggatggtgccacaaaggagagccttgggggttaggactactgtgctgtcagaaaagattagaaatggggatttctgaggaggaaccgccaagtgctctgccagaagggccaggcctcgagttggaactgtcttgcttgcatttcgtcctgtctacactgttgtacgcatgccctgaagttttcctgaatgatgagacaaaatgtgttttccttggccatttagagcctgtgttttcagagcaaacagtagaaaacaagaaaatgctttcaagtataaaaagtacctcaaaccatctgcagataacactggggttactggctctaccagcttttgaagtagcaaatccattatgccatagttaaggtacaagcagaacaataaaaatannngnn

SEQ ID NO: 10478 - DNA, 717 bp, Canis familiaris
  misc_feature (1)..(717): n = a or c or g or t
ctatgggtnnnctacattggtcagtgaacnnngcaggaacggaatgcaaagantcctcattcctttcatcccagncttnnacatcaatcagtcagangtggnnctcagccacagacaagacatcggggagataagagtgctgggggtcgacagagttcttgagaagctagaggtcttccccagctccccagttctagtggtctctggccacagggagtcttccctcacacctggcctggctgtctaccgggtaagagtagtcaacttcacctcccttcagcagacggcatcacccattttcatcaatatttcctgtgcgctcaccagtcaaagtgaggctgtgctagtgagagctctgaaggataaatctggtacagatcagtgtaaaggttcaagtgtcctccagaagttcctgagctctcaccagaccatcctctttaccctttttgcaatgctggcatcaacagctttcatctttctagcatacaatgccgtcttaaacaagatacagacagttcccattgtttatgtgccaactctaggaacatcacaaccaggttcttatgcccccaccacacgttctcctccgcctttcctgagtccccaacccccaccagctcagagtcggctacaacactggctgtggagtgtaaggcactaaactccacttggacaaatcccttcagctgtaaagaactggagtcataagcccccaaa

SEQ ID NO: 10479 - DNA, 572 bp, Canis familiaris
  misc_feature (1)..(572): n = a or c or g or t
ctggcatcggtgatacaggcgggtcatctggncaagctgcagaagctcgacctgagctataacgacagcatctgtgatgcaggatgggccatcttctgccaaaacgtggggttcctcaaagagctaagcgagctggatatcagccttcggccctcaacctcccgggattgcggacgctggtttagacacttgttacgtgctgtcgccaaactttctaagatcactgagataggcatgaaaagatggatcctccccacctcacaggaggaagaactagaacattttcagcaagatcacagaggcagcattcactttgacctgggcgagggtcagtagggtggcctcccaaggcgtcactacgctataggaaaaaacatgaatgagattcattcattcagtgtaatcagagtgtcagcttctgggctgtttggttggccccatgttacaaaagcgttgtaaagggacgcctgggtggctcagtggttgagcgtctgcctttgactcagggtgtgatcctgcagtcctgggatcgagtcccacatcaggctccctgcatagagcctccttcttcc

SEQ ID NO: 10480 - DNA, 627 bp, Canis familiaris
  misc_feature (1)..(627): n = a or c or g or t
annntgtgcagattgacttaccatggngncnctccatgtaaggtannngcagagaaatnnntnnacttacgaaatgagtacctgcaagcagatgaggccaataaaagatttttnnaacagaggtatggtaagagggtgattcagaaggcactggaagagatggaaagtaaggaatggctagaaaagaactcaaagagctgcccatgttgtgggactcccatagagaaattagatggatgtaacaagatgacatgtactggctgtatgcagtatttctgctggatttgcatgggttctctctctagagcaaacccttacaaacatttcactgatcctgcttccccgtgttttaatcggttgttccatgctgtggatgttaatggagatatttgggaagatgagattgaagactagttaactcctactgctcaagataaggaagtggaatggtttgccctaatcttttgtcgagtacagaaaataactgcaggatatttagggtaccgttaattcactcttcctttgtagaagatgtggaagaacaaggtttatattttcgtgtggtactactgattaaggcacattcatatgtttttcattgtaacatagagaaaattataagccaaa

SEQ ID NO: 10481 - DNA, 609 bp, Canis familiaris
  misc_feature (1)..(609): n = a or c or g or t
ttnctatgaattttgnnatacttcaaagccaaagccnnctntaaatgccatgaccaaatttacatgattcatactcattaaatatgtattacttggtatacagacttattttcataacgcaaattaaaactataaaatgacatttttatngcactacagaaatatttgtgtatgttaaactcttttctgattgatgctaattgggaaaacctgtcttggggcagggggtggggtctgagtctgaaacgctcacgaagagctgctcctctgtatagaaagcagagctctggaactgcttgatgggctttgcaggcacctccccatagtcaatgaacttaagacctaacatatttttcctaaaattttataattgaattcccaaaactctgccttattttatagtgtttctacaagatattccctcccaaagaacaaaaatggaatatttagtgagctgacattttataaccaatctgttttcatctgaggtgggaatctttgattccagaaatttataaaggttctgtatcttcacgttttgaataaatgtagtaccataaaaaaaaaatgacacatgatgacatgtcagagtgcttgtcattttatttt

SEQ ID NO: 10482 - DNA, 610 bp, Canis familiaris
  misc_feature (1)..(610): n = a or c or g or t
gcacaagtccatgtagaatcctgtcgcctctccacaccagttccagatgatnngggtctctcccactgnntcaggaagaccttcantgtacctgagcttttgacttctgccactgcagctgccttagcaacaccagggctggggggcggcatgggaggccggttccatttttccttttcctggttggacttgctcaaccacgttcttctgttggcagatctgcttccagattgatttttaagaaccatcactttcacattcctaatttttgtttgttttgtttgattttgttttgatttttctgaaacatacaacgctgccctgaaaatcatgtgtttttgagtttgtgttctgaaagcctccgtgctgccggattttggtgggggggggaatacaggatcctccagcacagaggcatttaagatttgcaactagcaatgcaattttttctaaatatgaggatatttacctttattaagaaattatacaaaacaacagtgtccttgatcatgttacattctcatactacttttggctctattttgattctgtgtggtggtaaatgaagatcattacaaacaaaaactgtaattttattatctttgattca

SEQ ID NO: 10483 - DNA, 522 bp, Canis familiaris
  misc_feature (1)..(522): n = a or c or g or t
tcggcgnctgaggctcgcgacccgagcctggggaagnaggtacnggcgaccatgagatccctgtggctgctcagaacccccttcctgtgtggcctgctctgggccttccgtgctccaggggctggggccgaggaacctggggccagcttctcccatcccggcagcgtgggcctggataagaatacagtgcacgaccaagagcatatcatggagcatctagaaggtgtcatcaacaaaccagaagcagagatgtccccacaagaactgcagctccattatttcaaaatgcatgattatgatggcaataatttgcttgacggcctagaactctccacagccatcactcatgtccataaggaggaagggaaacaggccccaccagtgagtgaagctgaactgattaacttaatagatggtgttctgagagacgatgacaagaacaatgatggatacattgactatgctgaatttgcaaaatcactncagtagacattgtttgnnnnttagttatatgcaaatgtg

SEQ ID NO: 10484 - DNA, 335 bp, Canis familiaris
  misc_feature (1)..(335): n = a or c or g or t
cccataccgnnnnnnnnnnnnnnngaagnnngaatgcatgttggnnnnngggaggggcccagggcaggggtgcatgcnntggagggcacagggcccaaatgctcttagggcctcnntannnngggaccccagggaatatttgccagaagnngnntnnnnctnnnctccattcatttattgtctttagnnnagcgntgttcacacnnagnnttaattggatccctcacacaacacacctctacccccgtgatacagctggtttgacccttgaacaatggtgaggggtgggggtgttgacccctgtgnannncataaaaatctacatatannnnnna

SEQ ID NO: 10485 - DNA, 423 bp, Canis familiaris
  misc_feature (1)..(423): n = a or c or g or t
ttgctatgaaacccagagccttaaagacgagagactgtatatatgtatgatttgaggcctcagagcctcacnncccccccccccccgagacctcagggaagggctctctgctatgcatcaaggttagaatatggggaatgaaagaactccagtgaagtggagctttgggagaacaggcacaaaggagtccatgatctctttctcccaggtgagtcctctcctctacttctccaacgttagttgtaaattccaggcaggagggctactctgggcaaggggatnnnnnnggggaaagggaataaggagaagctggtttcccagttcttgggctggtctaagtgtaaagctaaaagagagggtaaagggggtctgggttcccttcgttgtccagctcagctcaccagggtaagagagtcaaattgg

SEQ ID NO: 10486 - DNA, 590 bp, Canis familiaris
  misc_feature (1)..(590): n = a or c or g or t
agtatcaaacagttaaatacaaacatggatttgtatttagcacttcagttgttcacatactcttatctgtggnaagggacataagatttcggttggattacatttattgtatttattagtttctggatttattagtcatctggatgacttaagcagaaataaaatgtcagaaataaaatgtcatgtctttgtatgccgaattctgacgacctacctgcctgttgcttttggcatatggaaggagacccatggactctggcagctcccgctggttgttagaccgttgaaatggtccactgacggtccgtggagtgttctgggctgtgaaaccctgcggttcttccacctccaagaattacttatctgctattggattccagctcaaaatttagcagtttaatgtttcccaaattaatttctactgaagtgctcctgtgtacattgttttaaaacgtaaccaaagtgctacttgagtgtactttgtactctttcctagtgagttgatgtaattgctgctttgaccactgttttaaatgtatgtactagcagactaaatgtatgtgagcagactaaaatcatatatctcagtg

SEQ ID NO: 10487 - DNA, 587 bp, Canis familiaris
  misc_feature (1)..(587): n = a or c or g or t
aagggttcagacaannannatngacaagagcagctttctgataaacagccctctgtttctgtgactgaaagtnggaccctagccagagcctctctggccccccccaccccttccctgtcccggaccacatcccacagcagcagccaccggggctgggagatccttcgtcgcaataccctgggacatgtgaatctcgggctggaccttggcgagggggatggagaggacaatatctatcatttatgatgaggacccgtgttactgttggcctggcaaacagcatttctggagatgggcagtgggcatctgttgccccacatatctccctggttcctggaagtcccacatcttgagaaaagaaggtatctcttcaagcaaagttggacttggccatcaaagacaagagggatacaattcagtgacattaagtccacttatattgttgcatcaccatcactactcttcatcttcaggacgagttcatcatctggaaccggaactcttgtactccttaaacatgaactccccactatcttctccgcacagcccctgaaaaccaatatgctactttgtgtctatgaatttgc

SEQ ID NO: 10488 - DNA, 393 bp, Canis familiaris
  misc_feature (1)..(393): n = a or c or g or t
tctccacccaatcccctgcccgcaacngaaacggggctgccnannagttggtgacannntttgggnnnngaagtggtcggttggagtctcccctggactctggttatggagccggactcagcctggagtactcagaggccccggaggcagctgctnntctggacagagcatctgcccccccccccccgctccctttctggtagcttctttcctcaatgatgataaaaggaatctctggcattctacacctggaccatttgattgttttattttggaattggtgtatatcatgaagccttgctaaactaagttttgtgtgtatatatttaaaaaaaaatcagtgtttaaataaaaagacctatgtacttaatcctttaactctgcggatagcat

SEQ ID NO: 10489 - DNA, 182 bp, Canis familiaris
  misc_feature (1)..(182): n = a or c or g or t
cactttcaaacataaagatgcttgactgagcgagtggacattgcaaactagaaacgtgaggtccaaccgagttannnnnntagtctgggtgtgaatgtcttgcaaagggtttgtgttcgaaaaccatttgcagcattttaaaaatcctatttttaaaaagcgtagacttgggatccctgggt

SEQ ID NO: 10490 - DNA, 632 bp, Canis familiaris
  misc_feature (1)..(632): n = a or c or g or t
gacctgggttccaattctgattctgcttttactaactnnatgtatgacaatnnncaactggctgtctctcagctgcagttttcttcatctctgaaatacaagtaatacttctatctcagaagaccatttctaggattaactgagaaaggaacagaggcactttaggcttgagacaggccctacagagcagtagctgtttcttaattgttaagtagtcttttcatgctctaggaaaagggaatgaagaggtaagagaatggtgttaggagacagattaaagggatgttgtagactttgggatgggtaggtatattgtgttttccagttgggttgggtgggtatattttgtgttttcccatttattttcacattgctttacggtgttatttctataaacttcaatgttttaaacctcttttataaaattcagtgacaactagtagaattttcttctttgcagaagttaacttatctccaaagtggctgaaaatattgttcatcagtacatgattatcaaatgactgtgaagaatataaaattaaacttagtgacttaattagtcactgccttgctaactgtgctgtaatttttttaaacgtcttgtttttaatatagcagactatctcaatagt

SEQ ID NO: 10491 - DNA, 414 bp, Canis familiaris
  misc_feature (1)..(414): n = a or c or g or t
gtgaatgtctacatnnntggncttagatgtgcattagaatcatctaggcacttgtgaaacgacatatgttcaggctctactcccagagtttctttttcaattggtccagtgtaggacctaagcatcttttttcactgcacgttacaatgtgcagctaggatggagaaccgcactaatccagccttctaggtttgaagtgaccattctgcccacctctagaccattctacagcagttaggttacagtgttccctaactatgcaatcactgatacaagcactgagaattagcacattctcccaaaatgaacctgactttaagggacaaaaatagattcctgaaaaagttgtctgtgaattgaagccatacaaatgcaaccgttttaaacaaaccatttactgtctcacagactccc

SEQ ID NO: 10492 - DNA, 597 bp, Canis familiaris
  misc_feature (1)..(597): n = a or c or g or t
acaaatactatctccttcnagcgggtnnagnngtgggtttagtgtnngcatggtacatagcccatgatgtggcttaaaaatttnnggtctgttaatatacctcagatngcgtntagataagttgttcactctnnaatattaggaagtatattctgtagaacatacatattcccattcatctctgtattctcttctagctgttgttagaaggacagactgttaagctttatcttagttagcacactagaagtggcaatataccattgtttaatagtaaaagcatgactgaaattgtaaatatctcataagggatagccagtggcagggtaacatgtcgttcaatgtgcttcgctgtgttaacatcgttgtttcatttactgtttcaaaccaactttgttctgcaaaattaagataaaactgagccatatatgcagtaaaagaaatatgtcacaatgttttggttacttattacaaggtacttttcttgatcatgtttcctgatcatgtaactttgtacttaaaaaaaaaaatcctctaaaagacctcttaaattgtaacgtgaagctatataattagattctggaaattggtttatta

SEQ ID NO: 10493 - DNA, 561 bp, Canis familiaris
  misc_feature (1)..(561): n = a or c or g or t
tccagcctgggaccccaggagcacgggttagcagcnnncngtcccacctacccngcagtctgccccttgtaggacacccccccacccagctcacgccaggtaacacggggccccatcggtgttgtgagctgtccacccaaggggtttgggctgaattccatcttcctcctcttcagtcatttccagccaacctgaatatctagacccttcttccaattaaagactgcctctcctctgttatattcacatatacaaataatgctgccacatgttttctaattaggtgagcgagctcagagttggtgcttcttcccccaccccccactccgaaattctcttacaagataccattattatattttcacagactttgaaacacaaagtaacttagtggcatttaatattgggcatctgggcctttgaaagtatagctcagaagaaaaaccaacccacctgtgtaagtgaatcatctttctgttgttccaattctgtgggtaactgatgtaacggtgctataaacctgggtcctgggtgatgaggacacccactgagcgccatgtg

SEQ ID NO: 10494 - DNA, 244 bp, Canis familiaris
  misc_feature (1)..(244): n = a or c or g or t
gtgcaccagcccgtttccagnnnngtagcgggcgccaacgcgctcccgccccgccccggggcatnnnctcccgcnnggatcctggcgccnagggncncaagggagacagcnnnnnnngcccaactgcacactccactgcacgctgacacgctgcactcagaannncccgcctccacagcagacgcagaagccgattacacgcagcgcantaccgagccacaagcacaatcacagtcgtnnnctg

SEQ ID NO: 10495 - DNA, 290 bp, Canis familiaris
  misc_feature (1)..(290): n = a or c or g or t
aatatgnnnagcaaaggtgatcgtgccctcnnnngagttcagaatgcnnnaacgtgagaagctcaccatcatgaagcacatagaacnnnnncagcttgctcgannnctaagaaataagcagctcttgccctacatnnnnnggtttcggggctcttcatttctacnnagagggnnnnngtgcccagtggcaaaagacaagaccgnnnnnnnnnnnnnnnnngagnnnnntttctnnnnnnnnnncaagcaagannnnagaggcannnnnnngnnaaganannnnntgaaca

SEQ ID NO: 10496 - DNA, 502 bp, Canis familiaris
  misc_feature (1)..(502): n = a or c or g or t
tctgtacccagaacatgtgtctaaaangagcagcaaaaccnagtgggggggccantggtnntgggcagggnnaggtgaccatagaaaggccatagacgccggcatgaccgccccccacccctacgccatgcagcctaactctcctcccagcctcccaggggccaggtttgctccggtgatcagcccacgctcctgcctgaggctggggcacacacagtggtcaccacctactgagcaggctggctacccaaggccagctcagctgcctgcctgccatccagctcttctcagggggacggccgttggcatcacatccaacactgcgtgaccaggcttctggctgtccgaggtcttcccttgtggtgactagggagccacatgccactggagacactccaatcgagcactgcaagtcttcactgagtctcactggtttccactgtatctcatactactggacattttgatttctgaaaaagtttatgtaattatttggtctatg

SEQ ID NO: 10497 - DNA, 673 bp, Canis familiaris
  misc_feature (1)..(673): n = a or c or g or t
tgacctgcacgacttccgnngcggcctctccaagctgggggnngacagctagggccacggggcagagggcgggagcgtccgtctgtccgtccgcgcaggtgcgggtcgtcgtgtgtgcaccccggtggcgctgtcccctctcacctccccggcctggccaggctgccgagcccgggacgatgctgactcaggaaccttgcgctcggtctcccttcgacttttacgcggtcagggcagggacgtttgtatctctctcaagggctgttgcaaccataccaactgaacagagcattttctaatccaaatacaaacaccctttacacctccttttttttgaaagagcgttcagagtgtttgaacgttcagggggcaccagcacgtgggacacggtagcagcttccctcccgtaagaaccaagatgtttgcaagtgccacgtagcagaagctcgtccagagaaagaagacaagtctctggtgggcacacagggatcgcctgtgtccactctgccccccttcctcccgcctccagtttgtagggttgcgacaatgttcctttcctgggttttaatttctaagcggatgattgtgctgtgggaacagcgtgcagtgagggtgcttagcacagtgcctggcacaaagtaggtgcttaataaatatttgttcaattcnnnnn

SEQ ID NO: 10498 - DNA, 415 bp, Canis familiaris
  misc_feature (1)..(415): n = a or c or g or t
agccccccaagatatcatatgnntgcaactttctgttatatataggattaagagttacnncagaaatccttnnnnnanacaatattaacaaacagttccaacactttatccattaatttagtgttcactcattcaacataatgcannnagcctctcttatgttctagggattgtgacaagtccaggaatgggaagatgagtgtattacaggtctttcctttgtgacaaatactatattacagacaatacccagagactaatgggtcatagagaataaggaaagatttttttaggaaacagaggagaaagaggtattggtattcctgtaaaaggatgagaaaaggcttgacgagctctggaactaaaacacgtgattattctagggaagtggtgaaatataatattcaaaattgga

SEQ ID NO: 10499 - DNA, 248 bp, Canis familiaris
  misc_feature (1)..(248): n = a or c or g or t
caatgctgtgcagtatgtgcacagagtgntnncacatgagctgttatgccctcaannnggccccagctgtgagtattacttggtgctggcccagacacaccttctcaagaaggacttcgccaaggcagaggaatgccttcaacaagcagctcaaatggactacctgaaccctaatgtctggggtgtgaagggccatctctattttctaagtggaaatcacgctgaagccannnnnngctatgaacgaa

SEQ ID NO: 10500 - DNA, 41 bp, Canis familiaris
tctctgtgttctgatctgtgttggaacagtacatgtagatt

SEQ ID NO: 10501 - DNA, 627 bp, Canis familiaris
  misc_feature (1)..(627): n = a or c or g or t
tcactnnntgcctatcttaccacggtgancacctggaccatccgagacaagtttgcccggctctctcagnnnnnnacaatnntcaatctnnaacgngtcacnnagatcctagattactggggcgccaactctggcccattgacgtggcgcctcacccctgccgaagtacgccaggtgctggctctgcgcatagacttccgcagcgaggacatcaagaggctgcgcctatagccgccagggggagcccatctggcccgtcatacttcaggtcccattccctaagtggccacagccaagtagctgagcaaggctgtctggcttggggagctttgccagtgcagactgttccatccattgagacagcaggaaataaggctcagctcactctgctgtctgcactcagacctgtctgagtggtgctttgcaggcagcctctcctcaccaagagtggtgagtccccctgggctcctctaattatgtgggaaagccaaagcaggccagctttctgcatgggtggtcgttctcttctccttagatactacagcaaaccagctgcctccctgccagtcctaaaggacttgggtatatctggggaccgggggaattaggtttactctgaggagagtc

SEQ ID NO: 10502 - DNA, 633 bp, Canis familiaris
  misc_feature (1)..(633): n = a or c or g or t
ctgcatgtgagngtcgnnttgatctgaggggctgaattcagaggtcaacttcctatcccgtcagcccccggactgatgtgggnaccacgannnnnannaaagatcgatnngcccctttccttttctttccggccctcggccctgccaagccccagctgggggcctctcagtgccatcgacgctgtccaagaatgtccaggggtgaannagggggccccaaggcgcccggctcctcctgcctcctcacagccgtgggagccccagtgcctatcttagaaggaggctcaggaagggacacgctctgcccccgctgtccccggaccagcctcactctaggacgcagggctggcttctgtgtttctgtccgtcttcggccaagttctgtgttaatcacacacacacgtatatacgtaggagactttggcccgctctggcccttgggtccccatcaccctacctggtccggtccagatgccaagatgggggagttcaggtcgggctccggctcggggacgggtgtgtgttttgttctgcccaacttgtttttatagctctccctggggccgcggggaggaggggatctggatcttttttcagaactccgtttaatgtctgtctccatgctatggttgc

SEQ ID NO: 10503 - DNA, 309 bp, Canis familiaris
  misc_feature (1)..(309): n = a or c or g or t
gaaggagtgcnnnnngggcctnccagggctnnnnnnnccctcaggtaggggnnnnggggcctgttatgnnnnnnatcaatgttcacatcctcnnnnnnttnnnatgttgagatcctcancnccagtaggatggtatnangaagtggggccttttgggggtgannnnntcatgaaggtggagctcccgggagtgggatcaggnnnnntataaaaannnnnaccccagagctnnntgcacgtcctgccacgtnnnnncannnnnnngnnnnnnagtctgtgaacagagtgagggctctccccanannncga

SEQ ID NO: 10504 - DNA, 558 bp, Canis familiaris
  misc_feature (1)..(558): n = a or c or g or t
gagcgagccaaatcnnaggnnttnnactcccattggcattggccaggagttcaagggcatactcannncttccagagtcctttcctcatcccctgcctctgaaagctgtagagagtttcagaacttgtttaagcagttaaatagagctattaagagctttcctctctttccacccccaaccctctacacccctcagcagtcattagagaaatccctcgaagaaaccactgattttgacccatgaggcattagaactgtgctgttcaattggtaatcactggccacatgtggctatttaaactatattaaaaattcagttcctcagtgcattagccctattgtgagtattcatgaggctagtaaattctgtatttgacagcacagagattatggaacatttccatcatcacagaaagttcttttgggcaacactgcattagaatattttcatgctgctttttctcagatcagttcatttttgttagagaatgtagataatttaatgtgtcataatgttccatgaaaattcttgaagatcaattgcatatgtttattttt

SEQ ID NO: 10505 - DNA, 543 bp, Canis familiaris
  misc_feature (1)..(543): n = a or c or g or t
tcatcnnagctcttcctgtncttantgccaagaatgactttgctcttgttaaaatccatcccattctttaagacttgtgttacattctcttccctcatcatctcaatcagaatgccttctctcnntaacttcgaactgctcctgtgaatcatgtcttgtatttatgttctgcactngtctcattaaaggtgaactccttgagaccagtgttgatccttattcatttcaatcagtatatggtgtcatttattgtatatgcatggaatcttaaccaacaaggataggttagagatttgttttctgtttgagtgaacattggaaaaatgtatgatcactaattatcaataaaataaggaacataagaattgtttaggaaggattgagatgctgttctaccaaatgacagtcagtgttaatgattagaagaaactatgtgtgtgtgatatccttaggacatgtacattcatttaattatgattngcattcaattttnaaaaaattttaanannnttgctatgtcccattcatgcagcctaacatcta

SEQ ID NO: 10506 - DNA, 439 bp, Canis familiaris
  misc_feature (1)..(439): n = a or c or g or t
ctcatccttcttttnagtatttctataaagcactttttcctctccagattcttaactctgtgaaattccctacttagtntgccttaaaatgannnngctattagtgagccataaagtaacatttcacactagctgtgattaggccaaatatgtcataagttagcatcttaacatcttcacacagtaaaactagatactagggctattttgcaaaactttaaaaagctgtgatatcatacatttttctgtaacctgagctaaaaatccaaatacagcaatcattggcatgctttaggactgtggtttcaggtaggggtgtgttaaatccctggggtatccagataatcagtccgttgggaaaatgttaaaatggttatttgtatttactctcatccttttaaatttctatttttgtgtgttttataatgtacataatata

SEQ ID NO: 10507 - DNA, 330 bp, Canis familiaris
  misc_feature (1)..(330): n = a or c or g or t
cntgagcgtgcattcaattgctcacattgttttggctccaggggaaatctgacctcggaaaagnnnnagatganntgggtgtgggtggagatcctctgctatttcacagnnnnnnnnnagtcgagcagaacattcttcagaggtacctttctagggggnnnnttcctcccttcccgagagcagaggatgggnnnnnattcagctacctagctggggccagggtatggcccactgtggccagaagaggccaaggtcagctgtgcccaggatactgatagactctaatggggagaggatatttgaaattattctccnnnnngccctggactc

SEQ ID NO: 10508 - DNA, 578 bp, Canis familiaris
  misc_feature (1)..(578): n = a or c or g or t
acaatattgatagaaaaccaggatgtcccttctgtgtgttcttataatgtcnngttttaaacctgccatgatatatttgactctagatattgcctgtttgatttttcagttgatagcatatgattgttcaggggtggactgtgccatcagcttgcaatctcatcttgtaatgagaaaaccagaagctctagtgtttatccacagtagtaattaattcaatgggcaatcgtgagcaaacttgatttaatagtaatcttgtattttatattgtagttatatgtagatatttttcatccttttaacactcagaagattccaactttttttttactaacttctagttaactacaaagtatttcagataaagaatattaaactttctctttttcagttgctcatgattgagaatcaggattctgtagatcttctcctttaggacctactgacgaatcaaatgtaaatcaagatctagtactgcaagcatcacaagaatatgtagagattttgaatagaaagtatatgatctgaaagatatatagtaaaagtttattacctagatgtttaatataacattttaa

SEQ ID NO: 10509 - DNA, 550 bp, Canis familiaris
  misc_feature (1)..(550): n = a or c or g or t
ccgcacgccacgtgctcacttcccacaacatcgnnggccccnngtgaacgcncgtnngcctgtgtccatgnnnnnnntcggcccgggtggcccactgctctgaccatcccccactgacgcgaaaccgtgatttccggagttacaccatccccccacacacaccccaatttatgtagccccctcatatttttttttttccacaaaggcaaaatctattctactcaggctttgggactttcttccttgttcctactcagtgaattccaagtgttgctggccgcatgctccgaactccatgtcatttctgtatcctaggttcatgatgatcccacctcgccctgtggtttgaattcgatgccacggattgtaggccacattttcaattgtgtttcagaacacctttgcctgtcctttaattggattgaaagcacttttaccacatggagaaatatatttttaatttgtgatgcttttctacaaggtccactctttctgagtctaatgtgtttccaacacttagggagactctgatgaaagctgatgaattttc

SEQ ID NO: 10510 - DNA, 529 bp, Canis familiaris
  misc_feature (1)..(529): n = a or c or g or t
acaacaagcacaccaattacaccatggagcacatccgtgttgggtggnaggtgctgctgacgaccatcgccagaaccatcaacgaagtagagacgcagatcctgacgagagatgccaagggcattacccaggagcagatgaacgagtttagggcctccttcaaccactttgacaggaggaagaatggcctgatggatcacgaggacttcagagcctgcttgatttccatgggttatgatttgggcgaagctgaatttgcacgcatcatgaccctagtggatcccaacggacagggcactgtcaccttccagtccttcatcgacttcatgacgagggagacagctgacacagacacggcagagcaggtcattgcctccttccggatcctggcttctgataagccatacatcctggcagaggagctgcgtcgagagctgcccccagatcaggcccagtactgcatcaagaggatgcccgcctactcaggcccgggcagtgtgcccggagccctggattacaccgcgttctc

SEQ ID NO: 10511 - DNA, 483 bp, Canis familiaris
  misc_feature (1)..(483): n = a or c or g or t
ctgtcatacatcccatatgcnngggntncagtaattaaannnnnnncttctctctnnaattgaaaatcagaaactttgaaaagagcattggaacttnagcgttctgttttttgtgaaatacggttttcctgatgtaataatcactccccaaacaactggtgtgacaggttaagaccattttgtnnactggtggaaactacatgtttgattaaactgttaaatacttgtaacatgaaattcattatgtgtcattaacgtgttctttcccaaaataaggagtttttaatcattgccaattgtaaatgatttttagttttttaaccttttctaaacagcatttaaaatgtgaatatttaaggataaatctatgctgcaggcttttttggctctttaaaaatgtcaagttttactttaaaaaaaaactttaaatgtgaaagttttnnngctaaaaaattgcttannntatgtaataaataatatata

SEQ ID NO: 10512 - DNA, 589 bp, Canis familiaris
  misc_feature (1)..(589): n = a or c or g or t
cangaaggaaagtgatgaagaagaggagaaggagaagnnnnnncccatagaagcagaagcagaacagcagaacctacaagatgtcaagaggtgatcttggtacagggtacagcagaagtaacaagcaacagccagaatctgtagaccattatcagaggttggaagggaaaaggacccagccaaggacacttagaagaaacacccagtgtcggagaaggaaatcaggatgtgacttcctggaagccaaaggaaaaacaggggcttaacaaggagtgagtcatcaagtgtttgaaaagctgccaagacattaggtaaaacaaaacctggagattttccactggatttggcatcttcttctgtgtttcctatgtgatagaatcagattgagtcctggtgacaccaaaagccaatcctcccagctcagggagactgctgcatggatataatggctggagatatctggtagccatcctgacagcacaagaacagtgaacatactctaaagaaggtggacagagaagctggacagagcccagattgcccaataacactatggggcctccatgccagtcttggacaatttaccttt

SEQ ID NO: 10513 - DNA, 600 bp, Canis familiaris
  misc_feature (1)..(600): n = a or c or g or t
gannagattgtgtggtnnggnaccaccttatctgggttggtcagagtttctgtgttgtttgttttgcccatactcaccaggttcagaactaaagggaatgaggaccttctctccaagacaaacaggggttgcacttggccatccctgtccttcagcctagaaacggtaggtagtacagagctctcccttctccagcaactcttcacaataagcttaactcagaaactgagagaagatttagattagagggacctggggcaaggatcccggcttctctggagcagatattataaagttcatggctttgaggtagcatgtgtatctggtttaaactctgagtgtagcaaaagttctgagaggcttcgagacttgttctgaccccttccctccaagcatcgagccctccaggacctgcccaccttctctccaccgtctccccctgcccacccccagcccagctgaagggttcccatagatggctccacctacctgcacagtggtttgtgtgctgctgtcctggtcaccgcatcaaattccaatgtatacttcatagtgtaaaaatttatattattgtggggttttgtttttgtatattgctgt

SEQ ID NO: 10514 - DNA, 71 bp, Canis familiaris
  misc_feature (1)..(71): n = a or c or g or t
aattgacccaacagnnnnnnnnattctgccccggaatatccttgttgatgttttttacctctccnnnattt

SEQ ID NO: 10515 - DNA, 418 bp, Canis familiaris
  misc_feature (1)..(418): n = a or c or g or t
ctgtgttcccatgacactttatnnnnnaacacaggtggtaaaccagatttggnnngagggccatagtntnctgacccctgcactcaaaccaatccaggtcttagacctcatctttatatgtgaacagatctttgccattatnaccgactatccatcatcacttagatgaggcattcttgcaagtgtacaaggaaagaggcatttttataggcagtaaacaaatagttctttgtccctattccttcccaccctatccatgaaaaggaggcaagagaggcccatcccaagttggaccactcaggggtgttggccacctcttcctngtagctcaaaggcccctgacagagtaaaaatgcagcagctgcgggatccttcctcttgctaacacctccccaggtgaggtgggagccatcggtct

SEQ ID NO: 10516 - DNA, 531 bp, Canis familiaris
gatgagtggcacttggtggctcccatgctgactcgaaggatcggggtgggagtggctgtcctcaaccgtttgctctatgccgtcgggggctttgatggaacaaaccgcctcagctcagcagagtgttactaccccgagagaaatgagtggcgaatgatcacacccatgaacaccatccgaagtggggcaggagtctgtgtcctgcacaactgtatctatgctgcggggggctatgatggtcaggaccagctgaacagcgtggagcgctatgatgtagagacggaaacgtggacttttgtagctcccatgaagcatcggcgaagtgccctagggattactgtgcaccagggaagaatctacgttctgggaggctacgatggccacacattcctggacagtgtggagtgttatgacccagacacagacacctggagtgatgtgacccacatgacatccggccggagcggggtgggtgtcgctgtcaccatggaaccctgccggaagcagatcgaccagcagaactgtacctgt

SEQ ID NO: 10517 - DNA, 582 bp, Canis familiaris
  misc_feature (1)..(582): n = a or c or g or t
agtccccnagccacctgccnggccccgagagaagnnnnncaaccgcagccagagnntgcgtgtggtcaagagnaagccgcccgtgcgggagggtacctcgcgctccctgaaggttcggacaaggaaaaagaccatttcttcagacatgaatggctaggatctgcagagcctggccgagtcttacgtcttgccttatggggtaccagggactgcttggagggggcgactgggtgcacatctgacctgcctacaccagctgctcaggctgtgtcctcctggctcctgctctcggttaggggctggggcggtgcacagggatatacctgtgatgtaccaaagcaggctgggcccatgattctatttattgcctttctcatccttataccctcttgggtgtgtgggaccagagcccttcccagacctctgcaagtgaagccaaaagtccacccagctgtgttcattccttcctgtccttcaaagtacttgacagcctcctctaaggccccgtgtgtgtatatgtgtgtgtgtgtgtgcgcgcacgtgcacgtgttccctggttgtgttttgtgttggtgaatgagg

SEQ ID NO: 10518 - DNA, 533 bp, Canis familiaris
  misc_feature (1)..(533): n = a or c or g or t
tncaggggctttgnacngggcttcctgcttggccagggcaagattcaaagcnntgaaggaagcaggccctgcccctggctccctgaatgcccagcntctttttaaattggtgtnnngccctnnnngtctgagactttgttatgataatttctacagattttcttgctgtcccaaatacacagcttnnnnnngaggaaagcaaaagcaattgaatacagagaaattggataagaagaaatcaaaagccatcctaattcccagacccagcacagttggcccagccgcagggccccctgggaggggggggggaggcgcctccccaaccacggacccagggcccagcgcgcccagctgctccgcgggtgctcacctggatgttcagaaggttctagggccactttgtttttaagcatcatccgtgcctcaaaataccatagtagctgcttgaaaaaacctgaaattagactatctggttctctgctgtgtaaacattaggacgtacggtcaccagtctgtcannnnnntttcatctg

SEQ ID NO: 10519 - DNA, 648 bp, Canis familiaris
  misc_feature (1)..(648): n = a or c or g or t
ttatgggtacttttaaacatacaatgtgtacttacaatgattttcattaggtcaaaaagctgttattttgggaaaaaattggctnnattttccccatattctttctttttgatttcatattatctcaacttttttttccagctaaatcagaattccactccacctactcttctttcaaaagtcagccaattgccattatcgtcaaatgtggaggttgcttctacaagaggttgtcttaatttatgacatccaatcattcaacacacatttttgctaagctttgcatgaagaagtaatcaaatatgataaatatgggttttgccctcaatttgtgatctagggagagacatgacatattaataattaactctgatataatatattaattgatatattattactaacacaaatgaagtgttatagggatacagaggagctttgttcttctgggaatctgagaccaggcaagagtaccaataggagacaacatatgtagtatacccatctgtatgttactacagtctcagctttgaaagattgagggttggtctaaccatggtgacccaacttggtaaatgtatttttttgttctctactaattgcaacctcagagtcactatgtgacattttattttaatagaaatggaa

SEQ ID NO: 10520 - DNA, 584 bp, Canis familiaris
  misc_feature (1)..(584): n = a or c or g or t
catacatattttcatcnaaaaatgagtttcnaagactgagtaaatagtgattnnnnnnngcagtgtcnntaaattggtaaagaacacatttgatgtgaatcttgatgttcatttttatttttgacctgttataaaatattttcatgtttctgtaagtaaaatggtgatgccacccaccattgactatagtttctctagaaagcaggcatgctaaccatggaagaacatagaagtctctcagaatctttaatgctggttttaaccgatgcaacactaaaaatgtgttagcgtgctgtgcaattggttttcaattactattaatcttaatgacagagaaaaaagcaatgtgttagtaattattttggttgtgtgccattagtaaattgatagaaaaattaaggggattaacataacttcatttcattgccttatattaacatcttataatacaatagtttaagactaaaggaaacagatggagctgtttattgagacaactggtgaggaattatcatgtgttcattcccattttagagcgtgaaactcctacattagaatatataaagtcactttaaatattatct

SEQ ID NO: 10521 - DNA, 604 bp, Canis familiaris
  misc_feature (1)..(604): n = a or c or g or t
cttcgtgtgctctacatgccgggcccagcttcggggccaacatttctatgctgtnnagannagggcgtactgtgagagctgctatgtggccaccctggagaagtgctccacatgctcccaacccatcctggaccggatcctgcgggccatggggaaagcctaccaccctagctgctttacctgtgtggtgtgccaccgtggcctcgacggcatccctttcacagtggatgccaccagccagatccactgcattgaggacttccacaggaagtttgccccacggtgctcagtgtgtggtggggccatcatgcctgagccagggcaggaggagacggtacgaatcgttgctctggatcgcagttttcacattggctgttacaagtgcgaggagtgtgggctgctcctctcctccgagggcgagtgtcagggctgctacccgctggatgggcacatcttgtgcaaggcgtgcagtgcctggcgcatccaggagctctcagccactgtcacgaccgactgctgagccttcccagaaccacctgttacgtttccccttcccatcaactaccctccctgacatctatcctgacaactgtgtcaccaagta

SEQ ID NO: 10522 - DNA, 271 bp, Canis familiaris
  misc_feature (1)..(271): n = a or c or g or t
tcctaccctttnnctgtnnnngaagnaaattctgttgggnactggtttctgagtaatgtgggggnnnnaaacaggccnnnnnnnnnnnnnnnnngtgtgagtccaagtgacaacccctttgagcctcgttttcgtctgtaaaataaggttaataaagcttaacataaagggcttatgaggattgtgtgaaaaatccaccagtgtgttaggcacgtagtaggtcctcagtactagctattactcctcagannnnnncttcatatgcacagct

SEQ ID NO: 10523 - DNA, 533 bp, Canis familiaris
  misc_feature (1)..(533): n = a or c or g or t
acgaggacacngtttttcgatctgagatgtgttcaatgaaagaaaatatgaaaatgctgcaagacaggnnnnngaaggaaacacaagaagaggagctnnntaatgtacgcagaggactgatgtcattattcatggctcatgaaagaaatgttcatgtgtgatgtctagttatcaacaattttatccacctattcctttttgtgtataacaggaaataccagagtagccctacaaagagaaaaatacacgtcatccaggcaagagtacttttgtaggagcctccaaaaccaaagaaatggtgnnntatggnnnnnnaaaaaccactgtaacatgactccagcctcaagagtctgtaatttttttttaattgtattacacagacaagaaaaatttttgggaaaccagatagtaaaagtaatttgcttgtttttgtagtaatacttatattgcacaaatcttgctgagttaactgtacttataaaactaaaatttatcnnnnnttaaatgaatatannnnnnactaaatataatgt

SEQ ID NO: 10524 - DNA, 640 bp, Canis familiaris
cccctggaccctgccctggccaaagtggctggggattgcctggatgagaagcagtgtaagcagtgtgctaacaaggtgttacagcacatgaaggctgtgcaggcagaccaggagcgagagaggcagcggcggctggaagtagaacgagaggcggagaagaagcgggaggccaagcagcgagctaaggaggcccaggagcgagagctgcggaagcgggagaaggcagaggagaaggagcgccgaagaaaggagtacgacgccctcaaagcagccaagcgggagcaggaaaagaagcccaagaaggagaccaatcaggccccgaagctgcagctggcgtgcaggtgttccatcaaatgtggctgagagcgttcccagaacagggagctgcccttcttgtaggggttagatgcgaaaatcacaataaggcgaagactgcatatggtcacattacccttaaaagtcctctcatcatctgtgaagcgcacttaggcattttgagtgcatggtcccagctcccctctgtctcaggaaagctggcactgcctctggttggttctctctccagatcagaatggagtgctctctttttgcttgaacaccagaggaatccttttactgcattcagggaactgtgctgtat

SEQ ID NO: 10525 - DNA, 562 bp, Canis familiaris
  misc_feature (1)..(562): n = a or c or g or t
gacacgacaacgtgagtgctggaaggccncagcaagtctaatgtgcccattcaacaagtaaacaaactgaggcccagagaggggaaactgggtgccaacaccatacagaagaacaggcctaagacctgagtccctcatgtcttgagagggagttggagtcctggccttgctgagccctcctgggccaagaggggtgagactcagcttaggcagttcaccccagcagggccctatgtggggggcaggtggcctaagaagagccttccctgttcaggggagagaacagcttttctgttctttgctccctctgccctaagggctggcatagagccagtcctctgctgtccctctggggtcctctccctgcctggggctctcttcaccctgtcccaagtctaggctccagctggggggctggaggtcctcattgccgtggcaacaccatgagcctctatagagattaaggggggtgcttatacagaggggttgagagagcaaaatggttgccaaggaaacaggcctccctgggccaatgacttcctgcaaaaatcagattttagga

SEQ ID NO: 10526 - DNA, 637 bp, Canis familiaris
  misc_feature (1)..(637): n = a or c or g or t
ttctaattttaaaattctacaccatnataanngaacacaaggtaggtaggaatnnngcntcagtaacttatattaaaaggaatnnagattcnnaactatanngttgatnngttatataaaagaaaaataatcatcaagtgttgatacttaaccaatgttataactcataataagtactattttcttagttcaactaaaaaaatctttcttaaaataagcaatgacatttggcatgcgcctaaaaacttacaatgaactagcagtattgttagtttaagtgatattttttagattaagtgtagattttttttttcaccaaattccaggctaacagtaagaggacatgaaatttagaagcaatctctggatcaataaatataagtgaatcatatagcatgaaataaaattaaagaaaataaaatttgcaagggatggttgaaatagataaagagaattaaggaatacaaacttccagttataaaataaataggtcacagagatagaaagtacagcatagggaatacagttaataatattgtaattacattgtatggtgactacacttaccatggtgagcactgaataatgtacagaattactgaatcaatacgctgtacacctggatttaatatagcat

SEQ ID NO: 10527 - DNA, 308 bp, Canis familiaris
  misc_feature (1)..(308): n = a or c or g or t
gagttattacatnnactgagctcaagaatcccacagactgccccaatgcccgctaattcgggcagtgccgatctcaaatagnnntatggcaaatgtctgttttaattgcattgggttgnagtccagtagtaagnnaggnaaactaacaacaaaaatcagtatgacagatacatgctttcatggggcattcacagattccatgagtacaacttagaaggcttcacgatcaccttttnnagtgaatccaagaatgcataccctgnnnattnnncatgtnnnncaannnctaccaacttgattnnnttgtt

SEQ ID NO: 10528 - DNA, 584 bp, Canis familiaris
ggctgtggccccacaccccaacccttccctcccactcccccaccttgcccacagcacagctgaacctcaatgaggtagaaaagcaatggcagctcaaccaactcaacaacactgccaccaccctggtcttcatcactgtcgttgtcaacgtcttcatcacggcctttggggcacacaagacaggcttcctggctgccaggacctcaaggaatctgctctgaacaccgcctgggacccaggtcctaggtcctggaatggcttctgcctctttactctccacactgctaggacgatgggcactttccacagcccctaggagagctcccagaagggcggtggagatgcccttgctccctacccacagcttctgaattaagatgtgttattttactggtctaagtgaatcccatcttggtctggagtcctgagctcagactgcggtactgccaacctttctctctggtggcgtctcctgcatctaaggagtgtctgcctaaagccaagcctgcccaggttcaggcctctagttcatactccgcttcattcctcccctctgccctatccattttctcctttttgtaaaa

SEQ ID NO: 10529 - DNA, 375 bp, Canis familiaris
  misc_feature (1)..(375): n = a or c or g or t
tgttcatagctgatcacctgtgcancttttgacnatgtgtctatgaaatatggtgcttaaatagattttaacacttaaacaataattattgtctcagctaaattactgattttttaatttcatctaaaaaccacctgaacaaaatattaagatatatgcaataaaagcctaagtggttaccagttttacttggttgtaaacattggatttggttagaattccactactgttagaattcaattataatgaaatctcatattccaaacagcattgttagagcttgtgctagattgttggcattctaaatctttaaaatagtttgacaattgtaacaaaagaaaacagtactaaagaatgttatggggcagcccgggt

SEQ ID NO: 10530 - DNA, 614 bp, Canis familiaris
atgttcctgtatccctcatactcaccatctcagcaggactgagaggcaggctcagtttgggtgttaatcctgagtattgcttctgctgtggaactgaggaacaggggcacgttgctgagacaggggtgggagtgagcattgaaaggaggggtgagccctgctcttgttccagaggggagccattctctagcaggggaacactgctcattttctctagcatgttcccatgggaagtctagtttgctgttaatctggctgagaatctgagttctgtgccttagagacaatttgcactttaccaaattgtgcctgggacagccgtatgatttttcccaccaaatagctatgcaaacagaaaccagttcaaaggtggcagccatgcattagataaaaagtgaaaggttaggcagcagcaatgcctttgaatggttttctgtagctaattctcttggagtttgtcctgcttttcttctttctgcagtgctaggtgttttcagtttcccagtagtattgcttttgagttatagtataacctgagttattcctctgctctgacattgttgctgaagaactagctcattgttagccagatgtttgaaaggttgagggtggag

SEQ ID NO: 10531 - DNA, 402 bp, Canis familiaris
  misc_feature (1)..(402): n = a or c or g or t
atgtggtggggctgcacgcttccccctcaccagtgccatcaaggatgcgctcacnnngnnnnannntgtgtcctgctcacagggggggcagggatgccctcgcnnttggctctggctggnnaggagcctatcgcccgcnnngnngagcaccccccagcctcagtctccctgccttgggcccccgtagaggagcccccagctcagctccggtgcacaagcgggtagaggggggccctgggcagctggggcctggggagggcagagcgcgggacacagctcagcaaccccttcggattcgtgaaaatgctcgatggccccagccccacacggaggtgccttcgaccccctccccaggcgtccttgccaaagaaggccatttggccagtgctgccccacgcagcc

SEQ ID NO: 10532 - DNA, 484 bp, Canis familiaris
  misc_feature (1)..(484): n = a or c or g or t
atcctagaaatnnagccatattncttcgggtttcatcacaatgttcagaagaggaacagatagtgatagatgaaggccaaaaagttggcagttcctttcaaggtgatctgaatcgggcgggaaaggtgaaggtagacaatttcctagatttagaagatnnnnatgtggatgaagagattcaaccccaaatgagcaaggatttgctgctgcttccaggagaagtggaggaggatgtgtgcacgcgtgtcccttcttacattccttctgtggcccagcccctcgcccctggcgtaaaggcaggacccgctgtgggaggactggacaaacaaatagaagagacactcggagatgaagttcagcccttctcacttgatgaagaatttgattatgannnnnnnatgctaacccccaagttcactcctgcagagatggatgcgatcacagagctctccaagcaaaagagggacatcgccagcacaggctt

SEQ ID NO: 10533 - DNA, 499 bp, Canis familiaris
  misc_feature (1)..(499): n = a or c or g or t
catggtaaaataccacgtgaagtgtgacaatgaagagatccagaaaatnntgaaaaccagagaggtgtatgnnaannngncgtgggagtgcgannnngaggaactcgctgagatcctgcaannagagctgccagatgcagagaaatatgaaatcaataaattccacttcagcgacttgcccctgaccgaactnnagctggtgaaatgtgggatacagatgtactatgagctcaaagtggtggataaatttcacattcctcaggaggccctggtgcgcttcatgtactcgctgagcaagggctaccgcaggatcacctaccacaactggcggcacggcttcaacgtggggcagaccatgttctccttgctggtggtatggtgggagcgcggggggctggggctcctgccacaccacaggcctctgcacctcctccgggcagcagcagctttgaagaacatgatgcaagaggagtacatnnnnnncatacatggatcccaa

SEQ ID NO: 10534 - DNA, 458 bp, Canis familiaris
  misc_feature (1)..(458): n = a or c or g or t
ccccagactcacagcnnattccagagcccccaggnntcntaaactacaaagctgagctcggggagtggtgnnagtaagggggtcgtcctgcccgaggcctaccctggcacacgtgtttccgccgaatacggacgcaagcatatcccccgccaacgtgttccctcgtcccggctactcgcgggcccccccacgctttgactgtgggggtacccgccagcccccaggnnnnnnntgcgtggaaactcggaccccaacgcataggttgggtatacccactcgcgtgagtgagcaggtgtgacaaggccatctcccttcagtgccacgggccacgcacacgcagggccctgcttatgcacacatatgttttcgtacgctctcgggcgccctgcaacccagggaaagggtggggggcacatttgcaagcgtgcttttcgggggcgagctctcattgcaccggg

SEQ ID NO: 10535 - DNA, 651 bp, Canis familiaris
  misc_feature (1)..(651): n = a or c or g or t
tgctgtcaccaactccnggcnncgctcnnnactgtgtaccacannacnnnnnncaggcctgttgaacttgctctctaagagaggnngggaccgggctgggttcagggggacacccnnnaggggtggcagccntcacaggtgacacggaatgagaaccagggagctgctggaaaaaacagcggtaggtgccttgctctggcgtcccaggtggctggcggatggcagtgttgggccgccgcggggccgctccctgcccaaccccgccccagggccccaggaggcggaagcgcagcggaacaaggccagagccagtgctcgggcctctctcacactctgccctcccgctatcacatgctgagcctgggaggtggcccctagctcgcggaacacagaaggaaggagccagcccctacccgcggtctcctgtcgcttacagactctgcgggctcaatccggggagagagaggtggcccgcgggggttctcctccctcacagagacaggcccagaggtttacaagttttctaagcttttgataatgtgaagctccaggttaagaggatgctgttgagcacattgcagctatgtaatttttggtgtatgtatgtaatatttaaggttgaaagaaaataaatctcaaaagcaaannnnn

SEQ ID NO: 10536 - DNA, 607 bp, Canis familiaris
  misc_feature (1)..(607): n = a or c or g or t
tggtgctggtgatccccttccagaacccggannagcaggatgaaggctggctcatgggcgtgaaggagagtgactnnaaccagcacaannagctggagaaatgccggggcgtcttccctgagaacttcacagagcgggttcagtgagggccacggctggtgcagctctctgggcgtgtgaagaacaccttttcccgaaaaatgtgtgttttggttttttttttttttgatttttgtttttaaacttttgaaaagcaaagggaaactgagaggagaggcctaagccacgaggtgttctcccaaagattaggtggttttccaaagagcctggtttcagcaagtccagtggaatcaccagtgttcctgaagctgctgtgtcccctagttaggttctggccacccaccctgcgccccgcatgtgtgcctggccacagggcggggctaggggctgccaagccaccttgcttgcctgaagctttggccgagcagcctgggtgagggtcctctctcctggcagctgctgtgggtggggttgggtctctccagagagctcagggcccagacatcagcccggcctggccccaccctgcagaccgtctgtgtgccgt

SEQ ID NO: 10537 - DNA, 618 bp, Canis familiaris
  misc_feature (1)..(618): n = a or c or g or t
cccccgccccaccgagattcagctacatgccctgccccacccttggctnntccagtcccacagcnngcgctaccctgcgatnnagtgtnnagnnncnnctannnncaccctaaacagagccccatggtggcctgacnntagacgttccctcaacatctcagtctgnnannaggatccatgtctgagtgagaacacagagccctgccccatggggcctgtgtctccctggctcttcacacacgcacacacacatacagcgtttatagggtgtgtttgttgggatttgggctcagagtgagcaggactcaaatcatggctctgacagctcgtttactcataagacgttaatcataactgcctgggggctgttgggaggatttgtgagccccggacgagtgcctggcatctggcagctcctgagaaaggagacattattacgtaggaactcttgagtgaccactcccaagccagaggcccatagggtccccctgcccactaagatccagattaagtgagctccatttacattctgtgccctgtgaaggcttcatgctctccctgtgagtttggagtggaggctgaaatttccatgtttcctggcactggtctgctggccag

SEQ ID NO: 10538 - DNA, 626 bp, Canis familiaris
  misc_feature (1)..(626): n = a or c or g or t
atgctgcccagtattcgccagnngcactcttgtctattcggaaccnnattcaaaagcaagaagctcctgcaccagaattggaaaaagaaaagcaccaagaaatcaagaatgttgctcagcttcctgattatccagaactctctgggcaagggactgcctgtcctgagagtgggtctaccttcactgaggccaaggagagaccctggagcgtggaacaagagctaagcaagcaaactagagaggatcctccaggtgtgcaggaattggaagcattaatagacacaatccagaagcaactgaaagatcacccatgcaaagacaacattcacgaagcatttcaaatttatgaccaggaagcttcaggatttgtcgacaaagaaagattctttaaaatctgtgactctctcaacctcccgattgatgattccttgattaaggagctgatcaggctgtgctctcacggagaagacaagattaactactatgacttcgtgcgtgccttctcaaactgacctggctgacgagagcacgcaggacgaggctttgaggttagccctacgttttgaaacaccttgtgcttttcatagaggcgtttacagggctcttaaaattctgctttttggttc

SEQ ID NO: 10539 - DNA, 631 bp, Canis familiaris
  misc_feature (1)..(631): n = a or c or g or t
cgacatcgctgtggggaatnnnnnngatcgttnngctcgagtgctgaagatttccaatgacccaagtnnaggctacaatatcgagcagatggcaaagcgaggcaagaagctggttgagctgccctataccgtaaaggggatggacgtctcgttctcggggatcctgtctttcatagaggatgccgcccagcgcatgctggccacaggcgagtgcacgcctgaggatttgtgtttctctctgcaggagaccgtgttcgccatgctggtcgagatcacagagcgagccatggcacattgcggctcccaggaggccctcatcgtgggaggtgtgggctgtaacttgaggctacaggagatgatggagaccatgtgccaggaacgtggagcccggctttttgccacagatgagagattctgcattgacaacggggccatgatagcccaggccggctgggagatgtttcgggcagggcacaggacccccctcagtgactctgggatcacacagaggtaccggacagatgaagtggaagtgacctggagggactaacagggagcagatagtagcctctgggagcctgtggaagctgggnnnnctctccgtcccagnnnnnncgctcctggcccccat

SEQ ID NO: 10540 - DNA, 481 bp, Canis familiaris
ggccccacacacagggacccgtctcaggattgtgcccgctcccaagggaccatagataatgttggttagagtgtggcccgaattcctgggggtcggggtcatcccgatcaccgacaaatgggctggccccgagggtagtgcctgaccaatgagggcgggactcggtctagaccctcgcttctggctcgtgggaggccaggtccgctgagggcggagactgccttacgcgctgtccgatgacgggccctggcatgtacgggctggggaagccttagttaattggccagtcaggacccgggtctcgccctatccactccggtgcctccacttaactggccaatcagcccaggaggggcaggttccccggggccgactcggatttgcactaatgtcccttcacctccccccgcaccagtgggggcggggaaactcgtttctcttgtcttctgtctcttgtgcgtcccctgaccccaatcttcaa

SEQ ID NO: 10541 - DNA, 580 bp, Canis familiaris
  misc_feature (1)..(580): n = a or c or g or t
cccctgctacttcagtgcctggaatgggncntcatcctcnaggtccacntnnagcaagacccattctcccccgagaacgaggtgctctggatagaatnnntgaatatttagttggtgatggtccacagaacagatatgcccttatatgtcagcagtgtttttctcataatggcatggctttgaaagaagaatttgaatacattgcttttcgatgtgcctactgttttttcttgaatcctgcaagaaaaactagacctcaggctccaaggcttccagagtttagttttgagaagagacaggcagtggaaagctcaagttcacttggtcccttgccctcaggaagtgtgatttcatcagnnnnnnnnntcactgaagaatctgtagaagaacaagatgttcttgataacagtacagagcagacagacgagaaaatatcagacacagagcagacaaaccaagggactgaaaaagtatctggcacagaggaaccagaggagaagcaagaggctgagaatgaggacacctcaatgaatgaagccaaatcagtagtccccagagccgannnnnnncctaatcctga

SEQ ID NO: 10542 - DNA, 681 bp, Canis familiaris
  misc_feature (1)..(681): n = a or c or g or t
ctactatgaactgttaggggtgcatcctggtgccagcactgaagaagttaaacgagnnnnnnnctccaagtccaannagctgcaccctgatcnngaccctgggaacccagccctgcacagccgctttgtnnngctgagtgaagcataccaagtgctcagccatgagcacagccgccgcagctatgatcaccagctcagctccacaactcctccaaagtctccaggaaccacagtccatcccagggctgctcatcaagcgcacagcagctcctgggcaccccccaatgcacaatactgggcccagtttcatggtgtgaggcctcagggaccagagtcaaggcagcagcagcacagacacaaccagcgggtgctgggatactgcctcctgatcatgttggcaggcatgggcctgcactatgttgccttcaggaagctggagcagatgcaccggagcttcatggatgaaaaggatcggataatcacagccatctacaatgacacacgggcccgggccagggccaacagagccaagctccaggagcaactgcagaggcagcggctgcagccaccacctggaggcccagggatcgtgtctccgggcacaggcacccgcccgtgagcagctcgctgggatggggccttgctaccccatgggacttcccactccccaaaacgnnnnnn

SEQ ID NO: 10543 - DNA, 518 bp, Canis familiaris
  misc_feature (1)..(518): n = a or c or g or t
acgggcaggtgggcacacggcggtacatggctnntgaggtgcttgagggagccatcaacttccagagagatgccttcctgcgcattgatatgtacgccatggggctggtgctgtgggagcttgtgtcccgctgcaaggctgcagatggacccgtggatgagtacatgctgccgtttgaggaagagattggccagcacccatcactggaggagctgcaagaggtggttgtgcacaagaagatgcggcctaccattaaggatcactggctgaagcacccgggcctggcccagctctgcgtgaccatcgaggagtgctgggaccatgatgccgaggctcgtctgtctgcaggctgcgtggaggagcgggtggccctgatcaggaggtcggtcaacggcactacctcggactgtcttgtctccctggtgacctccgtcaccaatgtggacctgccccctaaggagtcgagcatctaagcccaggacacgagtggatctgaagaggaaagaaaaaaaagttgt

SEQ ID NO: 10544 - DNA, 653 bp, Canis familiaris
  misc_feature (1)..(653): n = a or c or g or t
acttcagtanngtnatttcagttaagtngtgagctcagagagctcaaaagtccttttcataaaaggtacnnatttccttgttgaattccttagaatactctgtgtcccccctcccttttttttttttttttcttaaaaaatactttttctaagggctaaagatcggcagtaactaaactaaaactgtttcttttaccaaaagccctttcaagagggctaatgatgaggttgggtgagactgtggtgcagtgagtgcctaggtcccaaaaagatctgcatgtggactggagaaagccagctggggagacagggagggaggtggggaaatcatttctcagtctctagaggtaaagattgaaggctggattttgcagtcattaaaaagccttctcagactcattcaacatccacagacctcactttctccttttatcaccatccataggcattggaaggaaagatggatctttctagatgctcgaggttttaaacaggtcctagcatactttgtggaggcaccttccagaatgttaagtacaacagctcctatttctgtaatggtgatttagaatgtcagattacagggccccgtctcaaagaaaattggccttgactttctgtaatctagaagcactttgagatgtttatacagc

SEQ ID NO: 10545 - DNA, 588 bp, Canis familiaris
  misc_feature (1)..(588): n = a or c or g or t
agagctgtgatgaccttgangagnngcagtgggctccaggacgatgtgcacaacggccttggccttgcccgctgcttgcttgctggcccagcagagatgggtcagtgacgggctctcaggcgtacctcatggggactgtctcaaacatgcccagtactgcaggggctgcttttcacaacagatgttagccctccctcttcccgttccctaaggtagttgctggcagctagaatcctcaaaacacaggtgagggggttctggcctctactttcattcaaaaaccatcctgtgcagaggcttctcttatctgggaaatgtcaacctgctgaaagcagggaaaattcggtttcatagcaccgtgaagcaaaccccctaagaggttcgcctctaatcaacattctccagagactgagctccatgggatatccccgccagccacttttccagcttttcatttacctgcgttagggcagggactgtttttaactcctctaagtgttccccagcaataaaacagggtcttgagtgtggttgttgctcagcagtggttttctgggtaggcttaaactgagcaggagatagaaggac

SEQ ID NO: 10546 - DNA, 494 bp, Canis familiaris
  misc_feature (1)..(494): n = a or c or g or t
gagannagactggtttaggattagactaccgataacttccaaagttccataggtaannnnaagatgaatccagggttgaaagacattagtttctattctttttttcaattcccatcaatgctactccattgaaactctactacctgaggtcaccaatcacttccatgttatcagatacaatagtcacattttgtcctcatcttaccttctcttcagcatcccaagtgacaattcccttcctgacagtttactttttctcagcttccacaacaccacagtcttctgttttttgtttttgtttttgtttcttttctttttcttttttttttttccccgtcnannnagtgactctggattatcnnnggtgnntccnnnnttgnnaggtnnngaaatgttantacatnnnnnggttcaattctgagaatctnnnnnnnnnnntaaactttctctttagggagnnnnnnnnnngtccaatgggtttaannnnnannnac

SEQ ID NO: 10547 - DNA, 567 bp, Canis familiaris
  misc_feature (1)..(567): n = a or c or g or t
cccctcattctgtagcaggtngcggcaccgggnnacgcggctgnnagtagctgnnagcccccgttgtgnnaaacaggtgcaataatgggtanncgtgggtactcccacctgaccacctatcaccccactgcgagtgctgtgtctgcccccaggccgctggcacaggacgccgggactagtgtgtgctgaccgtgcggagtgcgtccgtgctgcttcgtgagtcccaagcgggctactctgttttggggtgcagggacttggccagatggggctgtgtttctgggagagcagtgtgagcctgggcaggtcagggtgagttgggggctcttcagagcggggcttgcccctgttggcgaggtgttagcagctgcagctgcccatggagtgccggagacccgctaggggcagcttcccacgctctgcatctgggcttcaacctgaaattgctggattgtgtttgagaggtgggcccagatcctgggccctcagctgtgcggccgtgcacactcgctgccctcccactgcaggaaatgtagttgcaacgtctgtatcaacctgtgtattggt

SEQ ID NO: 10548 - DNA, 422 bp, Canis familiaris
aagaccccctcagaaacaggactctcatgccagagcctttgcaccaggtgccaaggggaggcgttgaagcttccagaatggccaccagtcacctgtgtgagggtccaggctcagtcgtcggcttagagagacaccatgggggctcctgcccatggtgatgccacacgcacagccccaaggactgcagggctcgccttgcgtgtgatgccaggacgcgccaggggctggggccatggggcagtgctgcccagactggcgccccaggagcccccagcgtggccgccgaggggccccctgacctgctcacccccccacgacgggggccgaaaggctctcgggggcttcagccccacacggggatgagagaagcagctcacagctcacacgaaagagaggcaaagtgcctgatatatttttatata

SEQ ID NO: 10549 - DNA, 93 bp, Canis familiaris
  misc_feature (1)..(93): n = a or c or g or t
agcccaggtggttcaggggttttnnnnncgccttgagcccagggcgtgatcctggagacccatgatcaagtcccacggtgggctccctgcatg

SEQ ID NO: 10550 - DNA, 473 bp, Canis familiaris
gataaatgacacggatgagacgcctgataaaactgctgcggccagtatcaaagcgcccttgcgaccgagaaagcactactccttcacggaagccaccgagaacctgcatctcgggctcccggccttgggcgggccggcgggcacaggcgggccgcgaggcagtctcagcgcgggcaagccgcacgggagcgcgggccctgggccagagcacgcggtgagcgggtacgagccctcctttggcaagtcttcccgaacaaaggccaaagacacgttcagggataagaaaagaagtctaatggaggaactctttgggtcgggctacgtcttcaaacacgaccaggcctgcacggctgcccctccacagctcgaggagacgccggaaagtaagatgcaccatctaccccccggccaggcctccgccagcaacgctttcagagattctaaagtaactgtggtaaattctattaagtcat

SEQ ID NO: 10551 - DNA, 610 bp, Canis familiaris
  misc_feature (1)..(610): n = a or c or g or t
ccagtttagatccagaggctnnnnnnngagtccgaccctggttatnnngncgtgttttctgtctggtnnnacaaganngctttgctcctctcaagtgggcacggacctttgtaaggatgttactgtgtcgagctttgtgccccattagacgccgaggatgggtcctgaagatcaagtgctattcagaggtctgcgctgtggagccacatgcactgaacaggcccccaggaaaccggctttgaagtctgttccatcacctttggagcagaagggcccacgggaacagtggtggggccacgctccaggcgggtgacgcccaggcccccctgtgctccccgcggcctgggggacacggggctccgggcagcgggccagtggccctcgagcgacatggcgccactgccctgcacctgtccgccccccacggccgtccccgctgtcactgtgggaagcctctcctgtcctccttgcaggggcaccaccggtctcggggcgcctgggcggtgcagtggggcaggtctccccgactcctgcgttcagccccgtggtgctctcggggtcgggagatcgagccccgcaccgggctnnnnnnccggggagtccccttctg

SEQ ID NO: 10552 - DNA, 591 bp, Canis familiaris
  misc_feature (1)..(591): n = a or c or g or t
tcagagaacttcctagaaaccagcaggtnntctctcccagaaagaggtggggctcgtnntcttgaatccccccgcccgccagcttccgggaaatgggttggtggnntctgctctccgccggtggccacgcaggtggcatcctctccaggtgcccgcttgtctcagcccttgagcgcacctgctgtgtgggacacgtgctggactctgccgagaccgccgcacggcagggggacgctgggagctttttgccaagcccaggtggtggtcacttcagtgtcaggaaaaatcagggtcacacaatccagtgaattttgtgctttttcggggggaaaagaaattacttaaaaactaaacatgaatttttttgaatgtagcccctgggcaataaacggaattttgagtttcttacacagtaagtagaatgaaatgttccccactgaggacaagactccggcagaagtgtggcaaaaagcactttaatttaatgctgctaactttgtgtttatgttcctttgctggagtgtgagacctgctcgacacagtgagtttcttgtctgatgtacttaaggtgacaaacttgcctgagttact

SEQ ID NO: 10553 - DNA, 611 bp, Canis familiaris
  misc_feature (1)..(611): n = a or c or g or t
caacctcatcaacaacaaaatcgccaaccgtgatgcagagaagaaagaagggcaggaaaaagaagagagcaaaaaggatagaaaagatgacaaagagaaggagaaggagaaggaaaagggtgacagcaagaaagaagagaaaaaggagaaaaaataaaacctgtagctttttaatttgtaaattaaaatcttataaacgaactcagtgtgccacttgagggttctttttattttaagtgcttgttgaaaagctgtaccgctgagaactctggcccaggtccctcttgctgtggcagagaagcaagtggacagggcctgagaccataccttcagggccactgaggctgctggggtgggggatatgagagctcaggctgcaggccctgcgagaagagtgaagggaatgtaaacattattggtcctcttcactcttctacctatataactggaagttgaattttcccaatctcacaagactcttggggttggttattggcaatctgcaaaaccgcaaaagggaatgcatgaattccataagccttagaacgccctgagttctgagtcattgaacnnnntacccatagccctggcaccctcagggctcaggatcc

SEQ ID NO: 10554 - DNA, 86 bp, Canis familiaris
  misc_feature (1)..(86): n = a or c or g or t
attcatcaattcccattggatatattacatccnnnaatttattatattattttgtctgtttctttaatctttgcccattgtacttt

SEQ ID NO: 10555 - DNA, 465 bp, Canis familiaris
  misc_feature (1)..(465): n = a or c or g or t
aggtatatccccccaaattcattacaactctatagaaaatangacttagaaatactatactgttagacaaaataaagtnntnnctnngcatnannnnncaaaataannactatggaatgtaacaaagttnnnnnncataacttacnnnnnntttatacttaatatgcccaaagacnnnnnaaattcatctcttgattattcctatagaataggttntaagaagcccatgtagacatactggatttatacttagaaattccccacttcctgtgcagtatctgnnctgtccttccaaatgataaagtgcaaataatttacatttagcagtgttactaataataaagtttgtttttttagaggtgatgctttttactcagaagatagtgttggtgactagattagaaggtacagatgggttgtgtaggtctaagtaatatgtatagatatgtatacatggttcaatat

SEQ ID NO: 10556 - DNA, 581 bp, Canis familiaris
  misc_feature (1)..(581): n = a or c or g or t
ctctctgaacttccnnctnggnntgagaaagaannctgnctcaaggatcagctagnnnnngcaatagggaaactgggagaaaacatgactcttaaacgagctgcatgggtgaaggtgccagctgggttctatgttggctcctatgtccatggagcaatgcacagctcctccctccacaacctggagctcgggaagtatggggccctggtggtctgcgagacatctgagcgcaaagcaagcctggaagaccttggccgccgccttgggcagcatgtggtgggcatggcccctctctctgttggctctttggatgatgagcctgggggagaggcggaaaccaagatgctgtcccagccatacttgctggatccctccatcacattgggacagtatgtgcagcctcaaggggtgtccgtagtagactttgtgcggtttgaatgtggagaaggtgaagaggcagcagaaaccgaataggttccggagacttggcccaggagatgtttattctttgctctggacatcattccgagaagttatttcctcagcctctacaaacccagaatttttttcattggagttta

SEQ ID NO: 10557 - DNA, 602 bp, Canis familiaris
  misc_feature (1)..(602): n = a or c or g or t
agctctgcatcccttcctcgcnnnaccccaccctggctccccccggctgccatgtggtctccctcttcactcagtacactccctactcgctggccagaggcaaggtgtgggatgagcaggagagaaacgcttatgcagacaaagtgttcgactgcatcgaggcctacgcccctggcttcaagggctctgtggtgggcagggacatcctcacaccacctgatttagagagaatctttgggcttcccggaggcaacatcttccactgtgccatgaccctggaccagctctacttcgcccgccccacgcccctgcactccggctaccgctgtcctctccggggcttgtacctctgcggaagcggcacccacccaggaggaggtgtcatgggagcccctggacgcaatgcagctcatgttgtcttcagagacctcaagagcatgtgaccctgagccaactctgacccaggaataagaatccatcctggagattttaagtcccctttgggtcagcttcccaggatatggctggaggcagacaagccctcgtgctcaagccactgttttagaagaaccatacaggttacatttgatacttgttaacct

SEQ ID NO: 10558 - DNA, 593 bp, Canis familiaris
  misc_feature (1)..(593): n = a or c or g or t
ttgctaaattactgcttttgcttgttaaaaagaaatgttactctgttgatctaacaaaggcaaattgtaattttttttttgatgcttcaaacacatgttcactgattttttttttctgttaacggatctttaaattccttttggttcctcccattgtcctaaaatagaactttcatattactaaaacctcngaagctcatctacccaggttgaacaaaagcatcaccaaggggaaaggaaaccttttttacttttacagaaaaaaaaaatgttaagattatatatagatgtattctttccattggatattgtattagagtcctccttacaggaaatgaaatagttttagcactcttagcattagcattcctagattggtgtctatagctacagttttaaaatgtataatctgaaaatgaagttaattttgcattttaagagcacaccatgatctatgtaaaaagactgtccatttggtgtatttttttaaaggagaaagcactttcatattaacaagtagcatgtgtatgaattttagattttcatatttgttgtgtctgtattcagtgaantnaaattgagcattcaaatgt

SEQ ID NO: 10559 - DNA, 499 bp, Canis familiaris
  misc_feature (1)..(499): n = a or c or g or t
gtccagaaggagccacatnntgagagcccttctcctaacatcgtgtacaggatatcacctcaaggacactatgtacctgagaaggcaaaaacgaggccagaacagagcaaaggatgccctgtaacacagttctggaagactttgaaggaaactatccgtttatataacctaacttatggtaagaccatgccagagaacctggtgcagcatagtgggatttcacagagtccttgtgaaagtagaagtgtgctctataaccgtcatgagggtgcagacagcatcacaggtaactgtcagaggtggaaaaccaaggtaccttacaaagtttcaaacagattcgaggcagatgctgtaaagtttaggaaatagcaggtacagaggaaacagattactgcgttccagttatatagaagaactaaataagtgatgcatcatcatgatggtttagatttgaattaagaaagcgatcataccaacaaaaagaaaacgtgacattata

SEQ ID NO: 10560 - DNA, 572 bp, Canis familiaris
  misc_feature (1)..(572): n = a or c or g or t
tcatnnatntactgctacacaagccagtacattttcctacttnnagtccatttaccattaggtgttctgattcttgcaccaatggcatcctgaatgatgtagtcctttaactctctgtacaatgtaaaagctcggtngncttgctccaggcttccaatgcttgttactagccaccttctcatattcaccctttttttcagctataaaatatcactggaagttccctgaatgcatcgtgctattttggatctctgtatctttgtatgtacatgtttatccctttcctaggaatgtccctgtctcctttcttggcttatctaattctatttattctccgaagtttttgtcctctgtgatgtccctaagattttctggcccatctcccacttgacttagatgccctttctatgtgtgtccatggcttacctttaccatggtatttatcttttatcataatttattcttcctaactggactaaaaactcctcataagatatttagtttttttttctttttcttttttttnnnngtnnngttgttagtacctaaactaacacttgttgatgttcaaa

SEQ ID NO: 10561 - DNA, 562 bp, Canis familiaris
  misc_feature (1)..(562): n = a or c or g or t
gttccaatggnnntcagctgtttacaatagagcaatgggnnngtnctgacaagctgcccagagctcacacgtgctttaatcgccttgacttacctccatatgaaacctttgaagatttacgagagaaactcctcatggctgtggaaaacgctcaaggatttgagggggtggattaagacccccggcctcggcctcggggtggttgttcgtccagcaagtcctgcttgcacttttgcatttgcctaacaacagactttgcagagaccaggcggaggagcagccccggcgtggctcctggagccgagccttcgcccgtgacttgcccaggttcagacccgggagcccagtcccaggtcacgttcctgcattttccaccacgaattatcaactggttgatgtgtacacgaattacatttcaggaggacttattctatttatgttgtgcctctgtaggcaaagcccttaataaatattttacatactttataatgacaatgaatggaattaatcactctacaggtatagtattacaactcatgtttactttttaaaaatgatttag

SEQ ID NO: 10562 - DNA, 559 bp, Canis familiaris
  misc_feature (1)..(559): n = a or c or g or t
cttcaccctcatccagctcacctgccttgtcctgctctgggtcatcaaagcatctccagctgccattgtcttcccgatgatggttnnggcgttggttttcgtcaggaaagtcatggatctctgtttctctaaacgagagctaagctggttagatgatctcatgcctgaaagtaaaaagaagaagttggatgatgccaaaaagaaggccaaggaggaagaggaggctgagaaaatgttagaaatggggggagacaagttccccttggagagcaggaagttactaagtagtcctggaaagagcaacagtttcagttattgctcaccacaggtcacaaggcgctgaattggtccatttgtggcttcgttcctggcattttgtttccactgtggaagaggtacacataaactggaagaagcccagaggccgagagggggcagaaaaggaagaaaggggatttggatcatgtagctcctagataatttattgccgaatcattgaactgattgtggttcatactgacggggaatgaggaaaatcttgtctttggtatttagaaat

SEQ ID NO: 10563 - DNA, 528 bp, Canis familiaris
agctcgaggagatcaagaaggagactggctagctccggatggatcctatagaaaacataatatgttcctgtgacgttttggggcaagcacttaaaatcactgtcaactgtgggaaatcacaaataaattcttaatgcaactggaaaaataagtctagaaagcaagatcgtatagtaaggctttggaagacgtgacctggtgacaggagactttaaagaatgaggagtctgagactgtgagatttctttcattctgaacctgtggaggaaaaaaaaaaaagcagatactgtgactaccagatttttgtttgtttcttttacttacactgaggatgcttgctgtcctaatttcagatatattgatttctactatgctggtgtactttatgcagtcgctatggaaattggatgtgttccaaaatctcagtgcgaatttgtactaggaactgatttttttatagtccagtctcttcctcattaacctgaacataggggcagcagggctttgggaattcagaagctctgtgta

SEQ ID NO: 10564 - DNA, 540 bp, Canis familiaris
  misc_feature (1)..(540): n = a or c or g or t
gaagaaaagatccaagttctccagcagcaaaatgnagacctcaaagcaangannnancagaacancgttgtcacaagacaactgtcnnannaaaatgccaanntgcaggaatatgtggagaaagaaacccaggagaagaagagattgagccgaaccaacgaagagctgcttnnnnagctccaaactggggacccaaccagcccggttaaactctcgcccacgtcccccgtctaccgtggctcctcctcggggccctcctcgcccgccagagtcagcgcgacgcccagatgacccacccagcgcttccacccggacggacggacggacggagtcttgaccgggctggccctgcgcgcatgctcagtagctgcatagctgcatcctaagcaaagtcctcttctgatcctcatataagactgtcctggtgttggcacttaggaaagtgtaaacggtagtgtctgatgtgcaaacgtttgaccgtagttagagccaaaagaaaggaagaaactccagttgttcttnnnnnntgaactttcactg

SEQ ID NO: 10565 - DNA, 493 bp, Canis familiaris
  misc_feature (1)..(493): n = a or c or g or t
tcaccanntagcacccagctggtttcttctttccttattcccccagcccannaaacttgtgctgacaccatgatgcctttgccacaggtggtgggggtgagggcagagattttagctcgggtcctgccnnaacgggccacacagccccaggcccacttctcttgccccgatagagtcccagggacctcagaaactgaaatctgatgtgattgggccagctctgctgccaatgtagctcgatctgctcaaaacttgaggatggacgatgaagaggaattggttgtacaatgaatgggtgggagacgctggcttcctgaggtgtatgtagattcctgacttaggggcagcttgtgtttatgagatgaagaggggagacttgtccctagtctcagagaaggcagcacatccactcattaggtagccctggtctttgctagcaagtgtccttaggtctnnnnagagaatgagagancaaggatgaacccacctcaca

SEQ ID NO: 10566 - DNA, 675 bp, Canis familiaris
  misc_feature (1)..(675): n = a or c or g or t
gggnnagggtaagaaanncagtttgtgcaaacctttttnaaagagacaggtggncngnctcaggacgagagacattcactaaattcacatttaccctccccatgtgctcctgcttttattttggtaatgctctgatgcaacattgcaactttatgaaatctttgtatgaaaacaaaaagactgcaaaaaatatactttcaaaagaaataattcattgcatgtttattatgcaagtttaaaagaacaaagaaaacctccagaagcaagttgatcaacgtgagagaactttcatgataattatattcatagtaataaagtgtcgtgggcttaattgtatatttggagccagtgtcatctaccaacaatgtgatacattatgaacttgacagttttgggttttctctttcttttggtcacctgcaatcagttgctgattaaggacttcttgtcaggccatttttaatatcaaagctgaagcaatatccattcagggatttcatcagttgcatcaaaaaacacggatgatgattatcaatcactccattttgagtccttttaaatgtaatgcttatcttcacaaataaaaagacaggctcagaatggaagcaagatcattttgcaaacattggagctcttttattaccagtatgcttgttaattttagaattgtaaaac

SEQ ID NO: 10567 - DNA, 551 bp, Canis familiaris
  misc_feature (1)..(551): n = a or c or g or t
gtncttnagtggctggcttccataannnnnaagactccttccaaaagacagctannnnnacattnnnaagaccaaagaaagttgaccaacctcctnnnnaaatgttaatgtcctgcttctcaaaaactacaggagaaagtacaatagcccagaacctttaaggcagtcgggggctagcatggagttatttgaagtctgttctacaagagattataaattctatagacaacaagctaatgatatttaagacagggtgtcnnnnactaagatgccacagattatcaaatcagaagaactggcactgagaaagctggtctcttaaaagatagtaatagcagctgacttgaagccctctccacccctggtttcaaatagtctgcctaacaaatgaacagggaagaacgaagcctgggtttgtgaggcctacgtgaagttctaaagagacgcatagaataggggagggaataagttcctggttggacacttgagcagagacagangaacatgcttcctcactaaggtggtgggaacgggcattcnnnacattnnna

SEQ ID NO: 10568 - DNA, 577 bp, Canis familiaris
  misc_feature (1)..(577): n = a or c or g or t
cagnngatcacaanncaacaaagacaatgnngctgcannnnnntccagaaaaaaaaatgatcaaagagaaaaaaatggnntctgccggcttaaaaagattaggtttcttaagtaaatagaaagctgaggggtgatataagaatcttttaaattctgaaggatttgaacaggattatcagagtattcaacaatactagaaatgaaagatcttccctgaagctatttaggaatattcagggtacactcttaacgatgatggaacacaaaaggcatctcctgtgctcccccataaaagttttgttgagattgtttcagtatggagtttcagaccttgcttaacatcttgtaactttgtttttttgaattttaggaggaccctgccttgattcgttggacctatgcaagatcaaacatctatcccaattttaggcccactcccaagacttcgcttttaggagctctgtttggaattgggcccctcttcttctggttttatgttttcaaaactgacagagataggaaagaaaaacttatccaggaaggaaaattggatcgaannnnnaacatttcatattaa

SEQ ID NO: 10569 - DNA, 553 bp, Canis familiaris
  misc_feature (1)..(553): n = a or c or g or t
tntgctcagtctcctcctcattctgtgcttcagggaatcgtatgacagactctatcttgatgtggttgtctcagtgtaatagcacagacgtgcaggagtttaaaaagggactggaaatcatactgcatactgcacatttgcttggagttgcacacctctaacgggaaaaaaaaaggagaagagagaaacttcattcagaggttctattaggttacagatgatcacatgcatttcatgactactaggtaataataatgtgggactggagtgataatagggaattgaaagactataaatggcacacccgtgcctagctctggggttggaagtgtggatatcttacacataaagcactaagaaataatgccctctctgttttgtgccagtgctaaactactgattgactcattgtaattatggaaagaaataaagggtatctgtcaaacaccttacctaagtcacatatcagaataggaagaaatgccactaacttctaaagaagttcaaaccctatatcagattttaattataaagtnnnnnngaggtatatcga

SEQ ID NO: 10570 - DNA, 675 bp, Canis familiaris
  misc_feature (1)..(675): n = a or c or g or t
tcatgatgnngatccagnngtntcctacaactccatctttgccatnnnnntggtgggtagtggtaccaataacgnnngtctggctgcaatgctgcgncagnnagcccagtatcatgccaaggaccccaacaacctcttcatggtgcgcttggcacagggcttgacacatttagggaagggcacactcaccctgtgtccctaccacagtgatcggcagctaatgagtcaagtggccgtggctggactactcactgtgcttgtctctttcctggatgtccgtaacatcatcctcggcaaatcgcactatgtattgtatgggctggtggctgccatgcagccccggatgctggttacattcgatgaggagttgcggccattaccggtgtctgtccgcgtgggccaggcagtggatgtggtgggccaggccggcaagcctaagactatcacggggttccagacacacacaaccccagtgttgttggcccacggggagagggcagaactggccactgaggagtttcttcctgtcacccccattctggaaggttttgttatccttcggaagaacccgaactatgacctctaagtggctaccaggggcgctgagctgccactgatatgtcagcaggccgtgnnnnntgctgccagatgtgnncactgctcctgttaacctcc

SEQ ID NO: 10571 - DNA, 397 bp, Canis familiaris
  misc_feature (1)..(397): n = a or c or g or t
atgttttcatggccatcaaaatgcatagtaacagtngtaattcatccagtgttaacttgtttttaagcttttagttgnnaccttgcatctgtaggataataggtagaaattcccaaaagtaatgttatgttgccttttactctccaatatctgatccccaacctacatatagcagttgctcagtagacatttgtagaataagtgaaaagcaagaggtaaaaaacctctggagtgaggaaaagaatgctatgaaggatatcatcacatcacatacttaatacagtgcttttcaaactatttttactgccaacctcaagaagaaattttctgttgtgacccagtacatatttatggaggtctatatacacctaaagaatagacatcttcaatatgtaca

SEQ ID NO: 10572 - DNA, 533 bp, Canis familiaris
  misc_feature (1)..(533): n = a or c or g or t
aagttgcaatatnctttactgctttcattctggtttatattccataaaatacagacttgggctgggagnnagaggcagtagagagagaggttatgtttactgtaaggtctgtgaacattaaggctaagaaaatagcaagttcagatagcttaattttgtttttatttaattaattttcagataattttgaagaagcaataccattggttcaatttgctatcttacatgtggcatattagtacttctcttgacatatttagaaatggtggggggggattgttgttttaagattatatttactttttgggaagagaacacaagtggtggggcagaggggcgggannnnnngactcaccactgagcagggagcccgatgcagggcccaatcccaggtgcccctacatttgtttgtttttaagattttatttgacagcacaagcaggaggagcggcagggagagggtgaagcaggctccccagtgagcaaggagcccaattcagagctcgatcccaggncccaggaattatgacctg

SEQ ID NO: 10573 - DNA, 635 bp, Canis familiaris
  misc_feature (1)..(635): n = a or c or g or t
atgacccangcagcatgccatcgagcagcttcacnnnaatacagattcctcccggtgcacatgctccagcaaatacgccagcagaagtgcctcatagcacaggtgtagcaagtaatactatccaanntactccacaaactattccagcgattgatcccacacttttcagtacagtttctcagggggatatccgtctaacaccagaggactttgctagagcccagaaatactgcaaatatgctggcagtgctttgcaatatgaagatgtcagcactgctgtgcagaatctacagaaggccctcaagttactaactacaggcagagaatgaagcctttgtacagcagatccatgcatttttggcttaaagaactaacagtccattactcgatcttcagcctatcaggagcacagttttaaggaagacttcagttgcattgactataacaatgaaatctgtgtctgtgtatcagattcctgttgaagcattcagcagcagcagcctcaaccagttttcattgtccatttagtggatccagtaatctctgggtatatagggctgatgtgagcaaaatcctaaaaatgcccattgattcctgattcagaaaatgaacacacgcttctataaaatgttact

SEQ ID NO: 10574 - DNA, 667 bp, Canis familiaris
  misc_feature (1)..(667): n = a or c or g or t
tgttccttttttaatgtgctcanccttctttaacagagtgagaaaatnnnaaaaaatgaggtgttgtattttaaaaagnnnatggagatgaatcaagagaatcccgtgagactatttgagtatgtctacacgtttctgttcctaggagcctttcctcaacggaattgactctcggacccactgtgtctggcagaatgtccagaatcctggaattcactaggaatgtgggaggtcctgctaatgcagcaaactcaagaactccggattgtacacctgttttaggagagttagtctttctggttttcagttccattttcatatctttaaatccctttagtttcttgcatacaaatgccataaacagtaaagagccagaaatatattctttcgtcatttatagataatatacactttccaagaaagaaacttattttttttttccccatttctggttttggaaaatttccagataagacttgtcttcattctcacaactgctctattttttttttccatagtaattatcaccttctaacctcctatgtaatttacttatttattacgtatcttgtcttgtatccttcctctagagtgtaagcacaatgaagacagggatttttgtatgtttttcatcaatggaatgtattcgcagcacctaaaatagtgc

SEQ ID NO: 10575 - DNA, 585 bp, Canis familiaris
  misc_feature (1)..(585): n = a or c or g or t
tcgacaaatcttgaaattaaaaaaggcaaaatatgtgcnnnngccaaaaatcataaatcaagtttttgggaagtgaagactggaagcttgcttacattaaattcggaaaacttttatactttttctgtaaatactttttttttttaaaaaaaactctgaatcagaatagccacatttggaacactttctgttagtcaatatttttagatagttagaacctggtcctaagcctaaagtgggcttgattctggaaagtaaatcttttcacaactgcctcgatgcacagaaagctttttaaaaatagacactctaaggtcttttgttcgcatggtcacacactgatgcttagatgttccagtatctaatatggccacagtagtcttgataaccaaagtcatttttcccatctttaggaacctacaccagaacaacaatatccaacagatctcaagctactgtgtgtgtgaatgaacattacgttttgtttcatccctgaatgctgtacatcagttttggattgtatattgtgtttgtgtatttatgctttgattcatagtaacttctcatgttatggaattgatttgc

SEQ ID NO: 10576 - DNA, 576 bp, Canis familiaris
  misc_feature (1)..(576): n = a or c or g or t
cctggcccccctccgcctnnagcngcagcccgccgccctcagganntgcgtgccgaccctgccctccaagcttggcgccagcccgaggaagccccgaggtgatgccaagaagtgccgcaaggtgtacggcatggagcaccgggacctgtggtgtacggcctgccgctggaaaaaggcctgccagcgcttcctggactgagcgccgccccggccgccggccgccaggactgggaggaataagctacccccccccgcccccgcctcccccgcggcagggtctctggaagccgctggcccccccagggggtgggggcgtcccaccactcaaagtgcctctgaagaaaccagccttttgcactaaagccaaacctcagggctgtccccttggcccgaggcccccagggtggccctgtcagggtgcggatgggatgggccgcacggggccagtgtgtgatgcactttgaggggcgacagggaggggcctcccctgcccgcacttaacctgccggttccagggctccgggggctgacatttgtatcgcgaagctcaggtgtctcgggnntgggccgcgccag

SEQ ID NO: 10577 - DNA, 555 bp, Canis familiaris
  misc_feature (1)..(555): n = a or c or g or t
cggnctgccccagagcagcagctgttccatcgttgacaggccaggtggtggggactgnnagggggctgncatctnnaangacagctggannagcannaagcggccatgcccccacactgttctcctcactcgtcatcctttcctctctgaagctggtgagcagaagcctccatctctnnaagacttcatcaccaccgtgagggggcatctgccccatcagccgcctctgcctggcagattggaaagctcaggcctacattgtggggctcctctaggaagtgcctttcctgcattaggtctgattagtccgtttccagccctgaacacagggaggtaatcaagtgggtgatgccagcggttgcagcttctctgtcaggagccgggcagatcctacggagcagggccactgcggtgtggtccaccccgacctacggccagagccctcccgagccgcgtcaaccctgcccgaccttccagcacagggagtctgggatgggcgctaatttcctccctcctgaagccagagggcccttccttggtgtaatgcagccattt

SEQ ID NO: 10578 - DNA, 447 bp, Canis familiaris
  misc_feature (1)..(447): n = a or c or g or t
tgtctgtagcactggatgcttctcannagactccttccaacattttttatgaagtgcnagatagtagatattttaagccataatggcctgttacaagtactcatctctgcctttgtaggagaaaaggagccatagacaataataaacaaatggcatgtttgtgttccaataaaacttgatttatagaaacagcaggcacagacaggatttggctcctatgcatggcttcccaatgcctggtagtgacacatgagaaaaacacttatccataaacttctgcaaaaattaagctaaatgttgcccatgctttgatttgattggcatgaggaatattttcttcttgcattgccaagtgccaagtatatgtgagtctcgaagatggctctttgtggtggctcagttggttnnnnnnccagttcttgaccnnnnntcaggacttgatctcag

SEQ ID NO: 10579 - DNA, 632 bp, Canis familiaris
  misc_feature (1)..(632): n = a or c or g or t
gggtnaggcnncctgggcggcagggctgggtgctccctggatggcagggcttgggcgcaccctggacagcagggcttgggtgcaccctgggcagcagggctgcacaccctggatggcagggctgggtgccccctggacggccggcggggcttgggtgcaccctgggcggcagggcggggcgcggggcggggagccacacctcagtctgtcccacctccgtccctgcctatgattttgtcttccttcgttgccgtggagacgaggttgtcccccctcccagggccgctcaccccccagcacgtcctccccgcccgcccaccgcccctcagttcaggtaacaccctcatgggtctccaggccgctgcggagggcccttgggcgccccaggcccccccacctcagcccggcccccccacagcagtaaggcagcaagggcccccggcctggcggctccccgtctcccagcacccgcttttgggaaaacgacctttcctctctgagctgaaccactctgtccatattacacagaagccatatttgtacgggggcgggggcggggcgttgtgctgtgtgcgtctgtctgtggggggagcagggagggggtcgtgtatctttataatctttctaactct

SEQ ID NO: 10580 - DNA, 558 bp, Canis familiaris
  misc_feature (1)..(558): n = a or c or g or t
tcaccaannacattgtagaggcnngactggctgaggacactaatctctactacatggcacttgtggaaagaggcacagccaaactccaggctgctgtggtgctgaaccctggctactcctccatcccacccattttccagctctgtctgaattggaaaggggagaaaaccaatagcaatgatgacaacattcgggccatggagagtgaggtcaacgtgtgctataaggagctgtgcggaccccggcccagccatcagctcttgaccaaccagctgcagcgcctgtgtgtgctgctggatgtctacctggagactgagagccacgatgacagtgtggaggggcccaaggaatttccccaggagaagatgtgtctgcggcttttcaggggtcccagcaggatgaagccatttaaatataaccatcctcaaggattcttcagccatcgctgacctcccacttcgcctgttgttgctccttatgcctgaagtgctgtgcctctactttctgctttggcccacannnggctcttgatattctccaaagacagttttnnnnnnn

SEQ ID NO: 10581 - DNA, 414 bp, Canis familiaris
  misc_feature (1)..(414): n = a or c or g or t
atcgtttgctctnnnncattccaagtaaaatatgtgtnnnnagtgatgcnnnnnnnnnngaatttaagagcacgagagctttctgttctgtattcctattgtccttgggnnnaaggagactccgnnnnnnntgctctttctctgggcccgacatgggaatgtgggtttgacctaaaaacatctaactagcacaggttggctggttttgttgtttttttttaacaagttcattgcactgacgggtattttgcatgtctgtaacttctgtcaacatttgtttgtgttaacttctgatgttctttcaactgactttgtttacttggccagatcactttgcagcacatgctgcatctttgtggcagagtcctgtactcttagtgattgttctaaacttctttattgctgtctgagaaa

SEQ ID NO: 10582 - DNA, 634 bp, Canis familiaris
  misc_feature (1)..(634): n = a or c or g or t
acatttaggtttatgatctacttngagttaattttttaagtgtgaggttnatgtctttggtttatttggttttgggggcatatgattatatgtccaattgttccaggaccatttgttgaaaagactttgttttccactgaatttctttttatatctttgtcaagaatcaatcagccatatttgtatgggtcaatgtctggactttctattctcttccattgatctgtgagtctctccctttaccaataccacatcgtcaaagttactgtagcttgtatccatcttaaaaatctattagtgtgattcctctaactttattcttccttttcaaaattattttaacttttctatcaattttgcctctccatataagatttagaacgagctaatatatacaaaagtgttgttgggattttgattggaattccattaaatctataaagtttgaggagaatcacatatgatagtgagtcttctaaacccttaatgtgacttgtctctccatttatttacatctatggcttctgtcatcagcatttcgtagtctaagtatacagatcttagacaaattttgttggatttatagctaagtatttattttcttggaacgattgtaagtggtattgtttttcta

SEQ ID NO: 10583 - DNA, 636 bp, Canis familiaris
  misc_feature (1)..(636): n = a or c or g or t
tncttgnnctgctggagctggggttttgctgnntcccagtcccacaacactgccaaaaatctgtgtgcgtgccagtgggtgggggggcaggggnnagccctagnntcctggggncnctgctgtgtcctgtctctggggctgtcatttctctgtggctggttgaaaagaaaaaggcagggaaactttctcagccttgcagataagtgtggcatttaccagcctgagctttgagaggctgtgccatctgtttcttgttctgggaccaaagtaaaaaaaaaatcaaagcacatttcctgtgtcatcaagggaggctcgcggccttctcagagcagggggcgccttttcgaactcagccccaaactttgtttacatgggtggggagatggaacggggtgggggtgggggcggtcaggaggagggggtgttgaggacctgggctgctggaaccaaagcagggacttcctggctggaggggtataaccccctcggccctccgacgtggaatttgggttattgcccaggcactgccagtgggaggtgaggtgaggagctcagcctcttcattgtctaaatgaggcctgaacgtgtgaagtgcnnnnnnngcttttcgtgtaccccccccaaccctccccaccc

SEQ ID NO: 10584 - DNA, 657 bp, Canis familiaris
  misc_feature (1)..(657): n = a or c or g or t
tatctgctatgatatgcggtttcctgaactctctctggcattggctcaggctnnagcagaaatactcacctacccttcagcttttngatctgttataggcccagcccactgggaggtgttgctgcgggcccgtgccattgaaacccagtgctacgtagtggcggcagcacagtgtggacgccaccacgagaaagagcaagttatggccacagcatggtggtggatccctggggaacagtggtggcccgctgctctgaaggaccaggcctctgccttgcccgaattgacctcaattatctgcggcagttacgccaacacctgcctgtgttccagcaccgcaggcctgacctctatggcaatctgggccacccattgtcttaagactttgacttctggaagttgagactcccactgtgagctggtgtggctgtgacttgaaggcaggacccaggcgcggctcccctcactgggagaaccttgactctctcgaatgaacacaggctcagcttcttgggaaagaagaagctttcacctgagctcagatttcagtttcagaaaggtggaattttatatagtcactgtttatttcatgaaaactgacgttatgctgagggctgagcagcactggcattgaaaaaaatataaccatcnnnagtn

SEQ ID NO: 10585 - DNA, 304 bp, Canis familiaris
  misc_feature (1)..(304): n = a or c or g or t
tcnactgtctgccagacactttgtctccnnnnnnnttcctcctgatatnctnnnnntcggttttgtgcanctttgttagcagtgctgttgaccaagaaaggctnnnacttggtccagaggttgtcattctccagactctagctggtccatctgacactgacgtgaaacatttgcgtattcaggaaagcccaagatctagcaagaggctacaatctaaaaccattttcacaaaatnannnagcctacttttgagatactacctctcccagtagctgcacacctgnnnnnggtggctgggatttan

SEQ ID NO: 10586 - DNA, 535 bp, Canis familiaris
  misc_feature (1)..(535): n = a or c or g or t
aaaaatcacgtcacagattttnattggtcccacatannaccagcgtttgaagcatatggtggatgataagattcattctcgtgccaggggacctattcagatccttaatagacagcccatggagggtagatctcgtgatggtggtctacgttttggagaaatggaacgagattgtcagattgcccatggagcagcccagtttttaagggaaagattgtttgaggcgtcagatccatatcaggttcatgtctgcaatctttgtggcataatggcgattgctaacacgaggacccatacatatgaatgccgaggctgccgcaataaaacccagatttctttggtgcgaatgccttatgcgtgcaagctgttgtttcaggaacttatgtctatgagtattgcacctcgaatgatgagtgtttagttcttttaaaaacctcaagatacttgtaaatatttttgtttcttcagtatgtttttttaaaaaaaaaaaaaccanagtgtactgcattgtgagagaaagcattttattgatttt

SEQ ID NO: 10587 - DNA, 348 bp, Canis familiaris
  misc_feature (1)..(348): n = a or c or g or t
gtcctnnnagtgcggtgcgcttntnntaggagcccagacagtccgtgnnnnnccgtgaggccccgtggtccnnantgccggatccagacacttccagggagggcgatcacatgtnntgcccacccccgggagcatctccaagcaagcnnncagggcnnnnnnagcccgacccccggcctcccccggcgtnnngnacaccccnagggcaatggtgcagggcaagtgatgnnnnnnntgggcccagcttcctccctgtcccnnnnncccagccccctgcctgtgggacaaagggcctnngcgtccaggnnnnccccantnnntgagcggaggtccccgagggagatnnnc

SEQ ID NO: 10588 - DNA, 556 bp, Canis familiaris
  misc_feature (1)..(556): n = a or c or g or t
tgccatctctgtggagctgtactacatctttgccacagtatggggtcgnnaacagtacactttgtatggcatcctcttctnngtcntcgccatcctgctgagcgtgggggcttgcatctccattgcactcacctacttccagttgtctggggaggattaccgctggtggtggcgatctgtgctgagcgttggctccactgggctcttcatcttcctctactcagttttctactatgcccggcgctctaacatgtcaggggcagtacagacagtagagttttttggttactccttactcactggttatgtcttcttcctcatgcnaggnnncatctcctttttttcttccctaaagttcatccgttatatnnatgttaacctcaagatggactgagttttgggtggcaaaactgttgcacttctctcccattcttcacgtccaggggcccattgatctcttctgattgagtggctgaattgtgtgatggcattgctgccttcccctttgccctttgggcctcccttcccccgggagggcctggaattacaaatctcn

SEQ ID NO: 10589 - DNA, 565 bp, Canis familiaris
  misc_feature (1)..(565): n = a or c or g or t
cttcacttgcctgcttttatgtgcacctttgtactgtcngnnnnnnnnnnggcgnnnnnnggggcggccccctccccccctcccccgcctcttgttggcaaggcccctgccatcggtcctgctcggcccctgcccggccgtgcggcgagcggggtgggagtctgcagcagagctaaggaatccttcaccccgtggacagaaaagacttaccaagtggagggactttaaataattggctcgactggccggtagccaggaagtggctttgagagagatacccaaggctgaaagggtttggttgggggttttttttttggttttttgaaccattgaaaaggtaggttttgccctcttcaggtctatttccaaatggttgtatccaaaaaaaacttttttttcccactccccacctgtccccctgttgccacagaagcaggggccctgtcccgctccctaatacgtgtaaaatttgtacaaaatatcttctatgaaaatgatttgtaatctgtagacttaatacctgggagatgtcttgagatgtaaaatcccatcctttgggtngtgg

SEQ ID NO: 10590 - DNA, 112 bp, Canis familiaris
  misc_feature (1)..(112): n = a or c or g or t
cnnnnnnnnnnnntgcnntgtnnncnnncacattcatgcnnnaannnnnactactnnnacgnnnnntatcaaatagagacacccagtttggctgaaagaaataaattggtga

SEQ ID NO: 10591 - DNA, 622 bp, Canis familiaris
  misc_feature (1)..(622): n = a or c or g or t
angactgtgccatacacatcctacccacccacacagggggaatttcccaatctgaaaactggagctactggtctcagagactcaattgcacaaaacgaaatagtaaaaggggagagagagcaatgaaaactgcagggctgtggaggggacagttgtgtgtggggtgctctgaggctgagcggacacctgcatccacctttcctttgcacatatcacacccttctagaatcttaagccattactagactgctctagagcctggtggagtgttagtctgtgcccagttctattcattcacgtgcttcctttgaatatcaaatgtgactgtttgaaaagctggtagaattaatccctctttactgtagatagtgctgcagaccttggattttttttttctgtgttctttcagatgagatatctataaatatctatacattatatatatatatatatgtgtgtttgtgtgtgtgtgtgtgtgtatgtatattgggtcttcctgggtgtggttttccatcagaggtggtctctttggtcaagtgaacttctactggagtttattattttcctctctgtataaagtgaagaacctaactttatgtattctggtggctgatgtcatgaa

SEQ ID NO: 10592 - DNA, 542 bp, Canis familiaris
ctaatgaagcatgaggatgtttgtacggcgctattaattacagccttcaattcccttgcctggaaggatactctgtcctgccagaggacgaccacccagctctgctggcctctgctcaaacaagtgctgtcagggacactgctcgcagatgctgttacgtggcttttcaccagtgtgctgaagggcttacagacgcacgggcaacacgatggctgcatggcttccttggtccacctggccttccagatatacgaggcactgcgtcccaggtacctggagataagagctgtgatggagcagatccctgacatacagaaggactctctagaccagtttgattgcaagctgttgaaccccactctacagaaagtggctgacgagcgccggaaggaccaattcaaacgcctcattgctggctgcatcgggaaacccttgggagaacagttccgaaaagaagttcacattaagaatcttccctcacttttcaaaaaaactaagccaatgctggagacagaggtgctggacaacgaggagggcggcct

SEQ ID NO: 10593 - DNA, 565 bp, Canis familiaris
  misc_feature (1)..(565): n = a or c or g or t
ctgtttgttagcnnnngtgaggtctctcttcttcacacatttgtctcatgtaatatactctgaccctgtgtggaaaggaatttttgttctgttttgtttttatttnacctacatgtactatttagcttcagtgtactagtctgccacctgtgtatttttagggtgctatggaaataatgaaaagaaacggggatttcagaagaaaattgtaaccaaattcatactttgtataattttttgatatcatgattgcaggtgattcacacgtacacacataaacacacccacagtgcagcctgaagtaactcccacagaagccgtcatcgtctttgtacatctatgtacaatgcaatcatttcatactttaaaactggtcagaaaactaattgtgatttctagtcttgcaaagctgtatgtagttagatgatgtgacaacctctaatatttatctaataaatatgtattcagatgaaacctgtatattaggtgttcatgtggttattttgtatttaaagatcaaattatntgactattgctagacannnnnntactctgttgtaacact

SEQ ID NO: 10594 - DNA, 653 bp, Canis familiaris
  misc_feature (1)..(653): n = a or c or g or t
tgatgacatacatgattgagggtggtagctcaagcannatggctcaggnnnngcgnnngctttaccagaaaccacaggctagtcaccagctgcttcgaatcctcactgatgctctggtcccatatctggtgggacaagtggctgctggcgcccaggcattgcagctctttgagtcccatgcagggcaccttggcccacagctcttcaataagtttgccctgccctatgtccgtgatgtggccaagcgagtgaaggccagggtgcaggaggcaggcctggcaccagtgcctatgatcatctttgctaaagatggacattttgccctggaggagctggcccaagctggctacgaggtggttgggcttgactggacagtggccccagagaaagcccgggagcgtgtggggaagatggtgaccttacagggcaacctggacccctgtgctctgtatgcatctgaggaggagatcggacggctggtgcagaagatgctggacgactttgggccacagcgttatattgccaacctgggccatggactctaccctgatatggacccagaacacgtgggggcctttgtggatgccgtgcataaatactcacgtctgcttcgacagaactgagcttacacattcaccctcaactaccactaa

SEQ ID NO: 10595 - DNA, 610 bp, Canis familiaris
  misc_feature (1)..(610): n = a or c or g or t
tcacctcnagnnacaggtcattcnngtgccnctcagctgctgcactacagatgacattaaagatgnnttcgttacccaggcagagcagcaacagatngagctgttggaaatcccagagcactctgacatcaagcagattgcacagccaggagcagcatatttttatgttgaacttgacacgggagagaaacttttccatagaattaagaagaattttcctttgcagtttggaagggaggtactggccagtgaagccatccttaatattcctgacaagtctgactggaggcaatgtcagctcagcaaggaagaggaagagatgcnggctcgccgcttccggaaagactttgagccctttgacttcactctggatgactaagtaaagggaaaggcactttatgaacttgacaggaagtattagtagcttgttttttttaagaaactacagtctcccatggggactgttactctgcctcttttttgtgcattcctatggaacctgcctgcagcaagaggcttgaaattattttttggaaaataattgtaggatgaaaatcctgttaaaattagcatgtctgtcatccagctccaagtacagcttatgttaatc

SEQ ID NO: 10596 - DNA, 579 bp, Canis familiaris
  misc_feature (1)..(579): n = a or c or g or t
cagccccaccacaaacacccgacgggggnnnnnnnggcnncgcacagagcggcggctgaatcaccaatcagaggcgggtggcgtagcgacgggcacccagggcagccaatcacaggcggaagcagagcctcaggggtgggcgccgcctgggacccaccctcctcgccttcggtctcctggagaaaggcggaaggaatgcggacctttctgaagtgacggccgcgtcagcctatcagaggtggactctagaaggcggggcggaagactgcaagaatgaaacagattgatggcacggggaaccaatgagaggcttgattcaggcggtccgggagtaccagaggacctgtccgggaagggaaatggggctacgtccaggtgatgttacgctatttaacgtcccgatgacgtcataggttaatgggcgctgctctgctttcccccttcgccgcctcctcccctcacccacattaaaagaccgtttacaggcctttgggggggttgggttttcatcactatatttgagtcattaagatacccctctacctcaatttcccccgctgcaggataggagaaactaaa

SEQ ID NO: 10597 - DNA, 423 bp, Canis familiaris
  misc_feature (1)..(423): n = a or c or g or t
tcccctattgtttaggattattgactggaattcaagatgaaangnnnnncccatttgatgagccatgcgtctactgganntgaatgggttttcaaaannaccctagcttttnacgnnnnnnggcctcggccttctnnnctgattcnnnagcaaggnnnatgaatnnnncacaattganagtaagtgtccctggcannnnngcctgtaatagcatctccagggaaatgctggaattcaagcnnntnagggacctccatcagtggggacagaggctnnngaaggtcnnnnnctgatgggcttctctgcaggtgtctagcctcctgctccccaaggaggggggctgtaacgtggatgcccccttnnngagctctgccnacaatcatccagtgcttttccaccttggcttgtggttttgtgtttgct

SEQ ID NO: 10598 - DNA, 571 bp, Canis familiaris
  misc_feature (1)..(571): n = a or c or g or t
aattttgccaaatatnnagctgnagtcagccttcctgcagatgcctgacaacgtgatgtnnaagccgtgtgtttgcgtggccctgtgtggggacgggaccccaaccccagcacngtctcctgtggacactggggcggtggccagggctctgcctggggccgcacggaagtgaccacaggagccctgtcctgcccgtgcctcctccccgcccgcacgcagcgtcctcagtggccttttgccgaggcagcccttccagtctggactgcaccggctccgagtacctctggctgcgtgggacgctctcaggggcgaggggtgccatcacccaacaccaagcaagtgcaattaacgtgaccttggcctcggtccttctagaaagccccgggtcctgctggaggaggcccggcgaggcagcccccccaagacccgagatgcgcgtctgattgaatgtagtcaatgcagaacctcggccgagcaccgcaaccactgtgtcccggggctgcgggctgtccccgcagcccagcgggtcggggaaggtggcggggactctccccaccctccctgcccacgg

SEQ ID NO: 10599 - DNA, 557 bp, Canis familiaris
  misc_feature (1)..(557): n = a or c or g or t
acacatgcacacgcacacacgtgcacacacaggcattgcnntgcagcacaagaaanntgcagannaccctcaccggtgggcatcaaggttgagccctcagggcagggggcatctgactctggccccccaggaggggggctctttggacttttgggacacccagcgaggagaccctaagacaagaaggagaagaaagagcctgaagaccttcagtctgaccccagccaccttccggggcatttggcactggaggaaaagaggccggctctgcagccccctcggggacgcccccaccagctcaaattccgagtgcagaaaagaaaccggaccccccagtgaggcctgccaggcctcccggaccctttgttactcaggaacctcaccttggacggaatgggatgggggcttcagtgcccgcccaccccccacctccgctctgccattccggcctgcctccttctggccggacagaactggtgctctcctctcccctgtccctactcccgtggacaggggaccttccccaccccaccccctcccattttgatggtgtctgt

SEQ ID NO: 10600 - DNA, 506 bp, Canis familiaris
  misc_feature (1)..(506): n = a or c or g or t
gtgtcctgcccttacgcttcggccgctgctgcagccgctgcagnnncctcttccccctacgtatatcgggacccgtgtaactcgagtctggccagnntgaggctcaaggccaaacagcacgcctctttcagctatcccgccgtgcccgggccgcccccggccgccaacctcagtccatgccagtacgccgttgaacggcccgtatgaatggcccggtccgtcgaccatccccgagggtggggcgagaatttacagactccccggactggggtcgtcttgactggcttgcccctgccccgggatctgagaggggtgctggggcagctcggggtggggggggatggtgggtggccagctcaggagagagccttccccctgccggccctgaggggtggactgggccctatacaccctacacacagtccgcgcccctgggactaaggccaggaacagggaccagttccccgggggccaactgacccnnnnnnnaccccgccttctccaga

SEQ ID NO: 10601 - DNA, 545 bp, Canis familiaris
  misc_feature (1)..(545): n = a or c or g or t
tatatcctcaaagggggctacagagacttctttccagaatatacnnngctgtgcgaaccacnnagctactgccctatgcatcaccaagaccataaagctgagctgctgagatgtcgaagccagagcaaagcatgnnaaggggagcggcagctgcaggagcagattgccttactggtgaaggatgtgagcccatgataatgggtcagtggttggctgcttaggagtcaccaaaagacgctgtagaaaccctgagcagaaagagtccatgttgtatgtggctaaacccaagattgtctgcaaaccaacaagttgccaagctaatgaaattccaggcctgagggttggttttagcagagctgctggctggtgacggagtctgagagtagccttgaattatatggagatttgtgttgcttcaggaagtagttacattctcttnnnanttagacttctcttctagcaggccagccagctcttttcctgggcttttgcctgtataagagagttgcccatcttctttcttgccttnnntgtttccttctctc

SEQ ID NO: 10602 - DNA, 482 bp, Canis familiaris
  misc_feature (1)..(482): n = a or c or g or t
aacaaagtaggagnnattcaagtgcttagtgaattcatcagtnacaaacactagagggggaaaaaagaaagactgtgtnnnagagagcgtgtctagccatgtccagcccatgcctgccctacactctactgtctgtgcaagcagaactgcagccctcggagtctggctgctgctgaacagtccaattcaaggactacttgaattgcagtgacagaaatgttcaaagtcttatcataacagaaaccactctgccctaaagtcaacattttgctgaagaaaaagattgattgaaccaagaacaattccctagacacatcactctgaaacaagaatgaatgatggtagtgaaagcaaagtcatccctggagtcgtttacggttccctaagaaccttctagaaggatcatttatagttgatgaatttaagacataactgtaaaggaaagattgggagactgaggttgggggtgaatttatatgaat

SEQ ID NO: 10603 - DNA, 701 bp, Canis familiaris
  misc_feature (1)..(701): n = a or c or g or t
cnngaatcagatgttcaggagatagaggtgtacaagctgnncnnnnagnccacacgtgcagacatcgccttgttgaagctgagcagccctgctgtcatcacctcaaaggtaatcccagcttgtctgccacccccaaattatgtggttgctgaccggacattatgttacatcactggctggggagaaacccaaggcacgtatggtgcggggctcctcaaggaagcccagctgcctgtgattgagaacaaagtgtgtaatcgctatgagtatctgaatggaagagtcaaatcgacagagctttgcgcggggaatttggctggaggcacagacagttgtcagggtgacagtggaggacctctggtttgcttcgagaaggacaagtacattttacaaggagtcacttcttggggtcttggctgtgcccgtcccaataagcctggtgtctatgttcgtgtgtcaaggtttgttacttggattgaaggaataatgagaaataattagttggatgggagacagagtgattcatcaacatacctagaagccagaacacgggtagggaatttagcatgctcagaaataattgacagtaatcaaatcaagacactgtacttataccatctactgccaaacctcaacgttttttagtattattgtggataaatgtttcccgtgcgtggactgttggattctgtaataataag

SEQ ID NO: 10604 - DNA, 632 bp, Canis familiaris
tgtcatctcagtcatcacagtgggggccacccaaccccaagaagtctacaccaggaagaatgcctgctggctcaactgggaggataccaaggccctgctggcctttgtcatcccagcactgatcatcgtggtggtgaacatgaccatcacggttgtggtcatctccaagatcctgagaccctccattggagacaagccaagcaagcaggagaagagtagcttgtttcagatcagcaagagcattggggtcctaacaccactcttggggctcacctggggttttggtcttgccactgtgttccaaggaagcaatgctgtgttccatattatatttacactcctcaatgcctttcagggattattcattttgctctttggatgcctctgggatcagaaggtacaggaagccttactaaagaagttttcactgtcaagatggtcttctcagcactcaaagtcaacatccctaggttcatctacaccagtattttctatgagttctccaatatcaagaagatttaacaatttatttggaaaaacaggaacgtacaatgtttccaccccagaaacaaccagctcatccctggaaaacacatccagtgcttactccttgctgaactaagaacaggaaa

SEQ ID NO: 10605 - DNA, 428 bp, Canis familiaris
  misc_feature (1)..(428): n = a or c or g or t
tttcagaaaaaaacaacnnnnnttnnnnnnnnnnnnnnnnttcctttnnngttggatatgngaagatttggttgnnagctagctgtagaacacactannnnnnnnnncttttttcaccagaataatnnnnnagttttttgtnnnnatgttatttctcannnaagcagaaatgctttgtaccanngnnncnccannnngnnnngagaaggggctnnnnnnncatnnntgtttccagttttatannnnnnataangaaagattnnnnncatgtnnnnnnncnnnnannnnctggannnnncgnncccttcattgcatctgtcttcccaggagagaattcagcaaagcagagagatttggttttctttnnntgtgcannnacaccatccattctgttnnntaattttgaaannnnnnncctccctnnagtt

SEQ ID NO: 10606 - DNA, 388 bp, Canis familiaris
  misc_feature (1)..(388): n = a or c or g or t
agaaagcggcccaggcccagccactcgagcgatcgcagcctcacaagtatttctgtgccacgaggatccggtggctcaataaacagnngcccccgggagggtcccctgtgctgaagctccccacgctgcccgcccaggcctggcgaaccccggggcgttggctccagctctgcagagccgcccgctactccccaccccccaccccccagctctaaggtcccagcatgagcaggcgactgcagacacttcccaagaccctattaccaacatggtagtgcacccccgggacttctagcacaatctggcatgttccctgcccatccttgctcttcccggtgtatcctgaggccagaactcctgtgaaaatgaggaatgtggccctcagtga

SEQ ID NO: 10607 - DNA, 680 bp, Canis familiaris
  misc_feature (1)..(680): n = a or c or g or t
tgtgtgtctagagatcctgagaccagcaggnctttcccataanccttgtttttcaaatcaatgacagaatttcctcacagtgaaatcagtgagctgcagctatccacaagtcctatgtaacttgctgcctagattatcgggctctactgtacaggctgccttagaatgagaggggccccaggctgacatctctgttgccaaatgttcaaaatcatttttattcaaacccattattctggcagtttctcaatgatatatcttaggggttaaaggcatgagctgatattcaagtgagtgccaaccatttcacataggtaggagggtggaatttcccctccattcatccctccctctcttgggtctgctctcttgtaaagcagcctcagctcaagtcagctgctggctactccctttcctatagattgttttggtggccttcccttacaaaagaaaaggcactaggctccccaagctctacagttctcctctctaccaaaatcagatttctagtcaagtcactttcagacttaaaagacagagatggaggttggctttagctccaagtctcagtccctggctggggaaaggggatctttttcctaccttccttaactatagttttaagttgccagtgtttgtttattcataatataaaaagttactctgctttttgaaagtga

SEQ ID NO: 10608 - DNA, 608 bp, Canis familiaris
  misc_feature (1)..(608): n = a or c or g or t
aaccccnagtnnttcctganngccatcatgcagtnnacggnnnntnagaacgagtggcnnctggacaagatggccctgcaatgtgatgtgaccaagaagaacagggaggacttcaagagccctnntcgggaaggggnntacatccatggcctcttcatggaaggcgcttgctgggacatacaggctgggatcattacagacgcaaagctgaaggatctgacaccgcccatgcctgtgatgttcatcaaagccattcctgcagataagcaggaccaccgcagtgtctatccttgtcctgtgtacaagacttgtcagcggggacccacctacgtgtggactttcaacctgaagactaaggagaaaccatcgaagtgggtgctagctggagttgctttgcttctccagacttagctttctgcagaaccactgagacaacaaggctgagctggaggctgcccagaaggacaagtgggtgaggggagacacaaacatgaatataaggaatcatacgtactcacaatgctgtagaattcttgcagggaacctggagagaagtgcctatagtaaggtggtgctggaagagtatagacccaggaactaggggagaa

SEQ ID NO: 10609 - DNA, 552 bp, Canis familiaris
  misc_feature (1)..(552): n = a or c or g or t
agcccaagtgtgaatcttggcttccctgtgnnnctcnnnnnnaatggctttcccactctgtgnctcagtttccttgtgtttacaaaactaatcccaatgactatttattaagcatctactctatgccaaatgcttttactcgtggcttctccctcagccagccttgagaaggctgcaggtggtgtcgtcatccccattttacagacaagtaactgaggcctggtgaggggtggagacttgtcccacactcacctagtaaagaatcatgcagccaggtcctatggtgggcctcgtcaacaagggagcttgaatggagaatctggggccagatacagctgactcccatctccagctctctttcccaggatgctttgtgaccccctgggcatcacagacagagcctccatttcctatttggaggtgcctggcaagatcactgtgccctacatggtgagggcactttgcaggcactgtagcccactctgcatccctcccagagacccccacccagcactggcttgtgttggagctagaccaaggctgtgcatgact

SEQ ID NO: 10610 - DNA, 601 bp, Canis familiaris
  misc_feature (1)..(601): n = a or c or g or t
atnnnacatacccgcagatataatcccatgtntacagcagcatcatgcattcacacccatccagagannnngccccacatataccaaggggaccagtcattcagactcacataccacaagcttgatgactaactcaggcctttccagagcttctctgccaccagtcagggttctggagttagggatgggtgtgggtattatactctgtctgggcctgacccctcaatccagcagaaattgaggggggaagaagatgaaggttgcctgtggaggcccccttcatctccctgtcctcaccatatgccttacccccattctcttcccctgctatgcaagtgttctcatggcctgtcccccaccctctcagcaaccaagttagctggggaaccataagaatgctgaggtcagggtcttccaatcctgaaagatccccagccccattcatccctcaggagtatgatggcgaggctggcctcagctcaggacccactgctgggcaggggacctagagaggttagcctaggttcagggagctatccctggcctagagaaggccttttctgcacacagacacccccatcacagcttccagacattgccc

SEQ ID NO: 10611 - DNA, 615 bp, Canis familiaris
  misc_feature (1)..(615): n = a or c or g or t
tcagtcttgaagacagnngacttcctaatgtcacctgacntggnnctcatatttgacttatnnnnaccacacanctaatggttttggcagagtcacctgcagtactcaagggaaaaggccgtcatcataagaagctgtcactcatatccattttcaggatcctacagtccatcatccaacacaacaaatgggctcctatgtgttctatctttccacataacccaagtgatgctttagtaactaaaaggaattccctggtttccctgtgaactctcagctggagtcctgtagaccagaccccactccaagcagaagatgaatttacagaggacacagcagccaaaagggagaagaaaaccccacacagtcccagtatcctctaggaaatcagacccagaagcccagccaagtggagaaggattctagagcagcagcggacccccagtgagagcagtcatttgttagccatgcccattggaacatagccagaaaggactcctgcttccacctttgatttattaaaaatacatggttgaggttcagcgagtaagtccacttcatatctgaagtttaggatgaaacttttcctattatttaggctgaaagtggaaattg

SEQ ID NO: 10612 - DNA, 437 bp, Canis familiaris
  misc_feature (1)..(437): n = a or c or g or t
aggaatatgggaaagaaaggacagattttcagcaagaaaatcacacatgtacctataaacagaccgtagaaaaccacaggactccaaattttcagtcttatgacttggacacatagacagaatgagagcaaagaagagctctaacannctanctcaagtggacttttatttaaaagagagaatnnnatgtttttaaatggagttatgaattttaaaaggataaaatgtcttatttatacagatggaccaaaattacaaaaagttataaaaattttatactgggagtaactttcatatannnnnnnntnnnnnnnnnnnattttaactttgttttatgcaaaaaaaaaaatcttatgtaaattaatggtgtgaatccatgacctttttatgtatttttataatgccagatttctttttattgaaaatgagtannnnag

SEQ ID NO: 10613 - DNA, 597 bp, Canis familiaris
cctgcccaccccaaattgtgtacagtctccagaggataccaccccttttccagctcccaagtaagagctggctctaggcctgtgttatatgttatatttagcctttttatatatgacatggggtttctgttgttggtattttagcacagtgtgtacaccttcatttaaatatatccgtgtgtgcatacatatgtatatatatgtatgtatgtatgtatgcatgcatatatatatatgtatatggaatatgtcacttctcaagagttcagcagaaggagatggggtcctgcagcccaggagaaagactgcatcctttctaatagtgtttgccacaagtgttagtcttctctattaactttttcctttgggagacagaatgaagcaaagcttcaagtgtttgctgttcccatggcagctaaatgagggtcttgggataacttcccttgtgttcctcaagccgcactttggggccctttctgcagtattagcccccttttttgctcggtgatgctctgtctgcgcctgtacgtgtgtgacagtcacttttgcatgccttttgtgtctggcttctagcgtttggggacaagatgctggaac

SEQ ID NO: 10614 - DNA, 492 bp, Canis familiaris
  misc_feature (1)..(492): n = a or c or g or t
acgtcaatgccattaacgaatccagcatgacaccccttcacatggctgccaacatcctgaataannagatgatnnnaatgctgatagnntgtggcgcaaacnnnaactnnnnnntctcctccacagggaatacagccctcaagctggcagtgtgcaccgcatccagcaaagccggccgactgctggcagcaggggtgagctgcatccgtttgctgctaattcatggagccaaagtaaatgcccgggaccataaaggtcaaacagctatccatgaggcatgttttggaggcagagaggcaataatcaatctcctgcttgaatttgaagcaaacgttaacatattaacaagaaacggggagtctccgatatacatgtacctccagcgaagttccaacatcagggacacagggcttctcgccaagctattttaccgctcttatcctttaagactaaccaataaccaagggattctacctgcaggaatcatgctgc

SEQ ID NO: 10615 - DNA, 615 bp, Canis familiaris
  misc_feature (1)..(615): n = a or c or g or t
gtgcaagtgcannagtgtccctcctcctcctgctccctccttgcagctctggtcttttggcttgggaataggcagagcatttgggctgcttcctgctgtgtagagggagtcttctccacctctgtgcgcccaggaattctcagcttgctttaggttctctttcgatgcactcattgcaatctttgaatcataaacagaggaaggtggcattccaccagtgggagataggcgttggtgtggacactgagactacactgggtagatgctagcttttaattgttattattaatataagggatcaaattaatttaagtgtgattctgggtctatggaacttttaattctgtgttctctatggaaactagtaaaatgcaaataagacaggggtattattgttggtctggtgagatgtttaatatttgcgacaggtaacttaaaaatggtgactgtgtgctgcagggaagtccccgtcccaaggggtttgtgtctttgtcagtaggtgtctcttcatcctttgtcatgtgttcccccagtccttcaatcacgtaagctattcattttggtttggagacctccatctcagaagtgtctgaaacatacctaatctcattctga

SEQ ID NO: 10616 - DNA, 122 bp, Canis familiaris
ctttgggcacatgcgggcccctggcctatgctggctcctcctcccaccctggctcacctgcctacctgtggggaagggggcttttcctcccagcaggggcttagttgtgctgggggtggcag

SEQ ID NO: 10617 - DNA, 138 bp, Canis familiaris
  misc_feature (1)..(138): n = a or c or g or t
atcccccagcacaggannngggttctcccccacccacacacacacacaggcggggagctcagaannngagacttgtaggtgaaccacnnnncaaggtgacttttcttacaagagcccggttggtgatattttattgtc

SEQ ID NO: 10618 - DNA, 556 bp, Canis familiaris
gtggtgtattttgcccctaaatcaatatcctgaggggacagatcaccttgccacaatcatgcatgacctaggaccacagttgggcagaaaagtttcttcaagaggcccaagcctcattatatagatgatgccagggccccggaagggtgagtggcccttgcagccacccagctgggacacccagagacctgatctgactctccacaacacagtagtccctacccaccacaagaactgggtccctgctcctctacattttctagcaccctgccctgacccctggaggagtccctcccaaatatgggattattctcttcccctctgtcccagctgcctgccatccccaaccccacctcacccctgctgggtagggaaggggctcatgtgggcccaggctgagcagtgagtgagcacatgcagctgtctgacactgtgaaattagtgcaccctactggtgacccaccccccccttgcccaattttgtacataaagtgacatgagatgcaacatgtgtgtgtatgtgtgtatgtgtatgagatatgtccagggttttgtt

SEQ ID NO: 10619 - DNA, 647 bp, Canis familiaris
  misc_feature (1)..(647): n = a or c or g or t
aatgttgcacatgaattcntagaagacacggatgggngnnagntngctgtactacagtgtgtacttgcaggactgattggcaagaaaatgggtatagaaaaggtnnacatcntaacagaattaaaatacagaaatttaaagcatattcttgctatggttttagattcattgactgcagaaagcctatgcagtgtttggaaagtgagcagaaattggcgtgaaattattgttcaagataaaaaagcaaatcggaggaggaaattttatatctcacaactgaaaacagattctgagggggctatattaaatgttgaggatgctgccactcggctccatcttataaatcgatcagctttaaaatctgtacaagctcaggctaggataccaggttttcagaaaggagaagtttcaacattttctccttggggagaagttttgacacctatagcaagctcttctgttactcacttaactagtaaacaggaagaatatgttaaggtaactgatgtgtgtatgtatctatgtacatcatgacctgagccaaaatcaagagtcaggcacttaaccaactgagccacctaagtgcccctagataaagatatatttggaaaaagcnnnnnnntaaatttaaaattgttgtttaactc

SEQ ID NO: 10620 - DNA, 578 bp, Canis familiaris
  misc_feature (1)..(578): n = a or c or g or t
agcaggtgctgacgacagagcacgagaagnngcaaaagctggagacggatgccatgttccgcctnnagcatggcgaggccgaccggagcacactgaagaaggccctccccaccctgagccacatccaggaggcccagagcgcctggaaggatgacttcgcactcaatagcatgctacggaagaggttccgggtgagcagggcatggggggagtgtcaggacctcgaagagggggccattgacaaggggggcagcatgcagggccagccctctccccaccatgtcctatctgcaggtgggtcatctggccctctgagcctcagtttgaccacatccctacctcaggagtagcctctgtctcctggggagccccagctcaccgggcacccctctgctgctcagctcctaacacacacctcataggtccactcaaccatcccaaaatgaagtccagatatcatcaacgcacccctacataattgccaaaaccctctctgcagtgccctgtggttaaaagaaaacaaaaattgaaagggaaagtcacctacaatgaaaagtaatcgtgggggcagcccgggt

SEQ ID NO: 10621 - DNA, 694 bp, Canis familiaris
  misc_feature (1)..(694): n = a or c or g or t
tgctcagggatcacaagtaccatccctctctgcccactggngctannnnnagggtgctggtcgtgcttcaatggnnnagaataaannnnnctgggatgtgtatttgtatgggttggtnnnnagatatnggcccagcattctgnnnctgtccntagntccatgggcaagaatgatgccaagtgcttggatcccactgcagggtnnngagnnngcaccttcagcctctgcctcactaagccatgtttttgccaaggaatgcccaaagcttattcccggagatgtatagtctagtttcccagtcacaatcaagtcatttccttggaccatcttcagcttccaagaataagtatcctatccaagcagaagccaacagactgacccacttgattctctctgaaagctctgccccctgagcggaatctgagccttgactaaactgcatgacccacatcctctccctgcaggaaagagaaatggggcagcctcaaggccccttagaaagtagaaagttgtttgtattttatccacattgattcatgcagcatcgagttttggagcactttctgtatgccagatcctgacctggcattggagtcacaaaaagaagtgcttcctgcctgacagaggttgttggcaggggccatgccatnnngataaaagaatttttcttgagcttgcatttcnnnnnntatat

SEQ ID NO: 10622 - DNA, 616 bp, Canis familiaris
tccctgtagaagctccctatggcagggggccccgcgtcctggttcaaccctcctcttctgggtacttcattatgactagttagccaacgaccagttagcacataactgactgcctcagtgtttggtggctgctcaggtgatggctgctttggggtacaccagggaagtgctctacgctcactctagagttagatgggtcccctccacccagaccccatcttgggtttggaacaccaggggtgagaagcagaggtggcagctgcagggggttcctgcagaccctagctgaggaccgaccctccctgcttcccctggcaggaatgtctacattgggatgtctacactgcctggggtcaggggtcggccggggctggggctgtgtgttggatgtatggaactttcagtctacaagacaaattaagttatgaaaattcagtgacttgtatttaatgccgatttgctataaagtattctatatttatatgatttcagagacttatgtactaaaggacacgccctttttggtgtccaacatctagttccaaccccagagggtggggcagatttgcctatttatttgtcctgtaggcctaggtgtccggaatcctgtttaaga

SEQ ID NO: 10623 - DNA, 725 bp, Canis familiaris
  misc_feature (1)..(725): n = a or c or g or t
gcacactgtgtcagtgtcagtagaatttancagtaccaaatatnnacatcatttctangttcgntaagacctgacaatgatacaattgttcagctcgcaaaacaaattattgttcatgaaaattacagcnnagccacctatgaaaatgacatagctttgattgaattgagaaaacgctcaaaccaaaaagaatgttcgctgcctcattccatccctgcctgtgtcccctggtcttcatatctattccaacctaatgacagatgcactgtttctggctggggtcgagaaaaagacaaccaaaaagtttatgtacttaagtggggtgacgttaagctaatagacaactgctccaagttttacccaggtcgctactttgaaaaagaaatggtgtgtgcaggtacagatgacggttccatcgacgcctgtaaaggggactctggaggtcccttagtctgtaaggatatcaacaatgtgacttatgtttggggttttgtgagttggggtgaaaactgcggaaacccagagtacccaggtgtttacaccaaagtagccaattattttgactggattagccatcacgtgggaaggtctcttatttctcagtacaatgtataaaattgtggtctctctcttctactctttttctctagggagttggattttagttgaaatgatactgcataattagtacttcnctaggaaaaaaataataaagcacattnnnn

SEQ ID NO: 10624 - DNA, 528 bp, Canis familiaris
  misc_feature (1)..(528): n = a or c or g or t
tcaatgatacgcagcacagttggcttttctttaattaataaaacagacacagagttcagatagtntatcaactcaaagataattcttttttgnctctttcacagcttactaacatcaaataatgcaattgtactgttatgcaatataagggacatatttgtttgcatatgttcaaaattgctaatgcagatattttattgatagtggaaatatagtaatctaacagaagataaggagatctgaaaaaatgaggtatttcttcatcataattaatttcagattgctaagtagcatttgtaagcatgagtgtgatatttagctcaagaatggatataaaatgtattaaatacttgatgaaaggagactttttagtcaataccaaataatagaaaagcagtaatttttacttcactactattttttttatctactattcttagatatagtacagtgtactctatcaattaaacaaatccnaagttttacattcattataacacatttctgacagaatcttagtgttttaac

SEQ ID NO: 10625 - DNA, 552 bp, Canis familiaris
  misc_feature (1)..(552): n = a or c or g or t
gagtgttcaagatctaagctcatttgatgannncagttcggaactnaaatctnnaagattggagtggagtnnnnnnnncaaatctgagaaattttggagagaaaatgctgtaaggttaaatgagaagaattatgagcttttaaaaattttgacaaaacttctggaggtgtcggatgatccacaagtcttagctgttgctgctcatgatgttggagaatatgtgcggcattatccacgaggcaaacgggaatatcttggtaaacagctccaatctgagcaaccccagactgctgctgcccgaagctgaatgtgtcctccaacctcagaatctccagcagtcgtgtttaacctgggacagagtacctggaataggaatcttagtagttagggtcaggagcaaataccttttcattttacttgcacttatcttctgttgtgtcacttttcccaatgctgatttttgttaaatgtgtttgcccattaagttgtataaaagtaagtgctttctgttgctaaggagaagattactcacatatactgcttgtaatttct

SEQ ID NO: 10626 - DNA, 632 bp, Canis familiaris
  misc_feature (1)..(632): n = a or c or g or t
agtagtcagacagagnctactggacnnnncaaggacctggggtgagttccgagtcgttgagcgtaaggtnnnaatgaaggagttgtngcgggcgctggaagagggacgggttcgggaagtctttggctcaggcacagcttgccaggtctgccctgtgcaccagatcctgtaccaaggcaagcatttgcgcattcccaccatggaaaatgggcccgagcttatcctccgcttcctgaaggagctgaaggagatccagtacggaacaagagcccacgactggatgctcccggtatgacagcgccctgccctacctctcctcggacccaccctcccgtagcatccagccctcgccggaccctcccctccctaccgatgactcacctgaagtgcaatatgaaatataaaaggccgggggctgccgggacgcctgggtctctggcgcccccacatggcctctacactcccaaagccataagggccggacccagagcatctaggcccctcgccccgcctctcagaccttggtgggggatctgggctccccgctgctccgtgtctgggggccaaggatgccctttggcccccccgactccacatctctccgttctcaggccggatctcccggtgctgct

SEQ ID NO: 10627 - DNA, 531 bp, Canis familiaris
  misc_feature (1)..(531): n = a or c or g or t
gtattctttcttatttctagagccactcacctcattanaccctcttccttcccctcannnnnngcctcttgagcttgagcttgtctaattttggaatcagtaactttctatcactcaccaggctgtgagccaaggcaaaaaaataaggagactttttgtcttcactgtgaagagaagaatctaaccctagacgagccagctccctgagggtccttctggctggtttcaggctctcgagccatggatgaggggtagaggaagacagtggtaccactaacctcagttaggaagctagagcccttggagtggaaacaaagtcttgagccttgggtagattagagaagaagcaggatagaaccttgctgccctgtgacctctggtcttgcctttccctgctgagctccctgccctctgaagaagaggagcaaactcactaccacatgtgtaataatgataccctcatccctcctgccttgccccatagcctctgctttctcttctgcctcttgctgcttctgtaagtgcagaccc

SEQ ID NO: 10628 - DNA, 614 bp, Canis familiaris
  misc_feature (1)..(614): n = a or c or g or t
gaaagaccccaagggtgccaccttcacctggaacccctccaaannnnangaacccatccagaagaatnnngagcgtgactcctgtggctgctacagtgtgtccagtgtcctaccaggctgtgctgatccatggaaccatggggacaccttctcctgcacagccacccaccctgaatccaagagcccgatcactgtcagcatcaccaaaaccacagagcacatcccgccccaggtccacctgctgccgccgccgtcggaagagctggccctcaatgagctggtgacactgacgtgcttggtgaggggcttcaaaccaaaagatgtgctcgtacgatggctgcaagggacccaggagctaccccaagagaagtacttgacctgggagcccctgaaggagcctgaccagaccaacatgtttgccgtgaccagcatgctgagggtgacagccgaagactggaagcagggggagaagttctcctgcatggtgggccacgaggctctgcccatgtccttcacccagaagaccatcgaccgcctggcgggtaaacccacccacgtcaacgtgtctgtggtcnnngcagaggtggacggcatnnnctactaaaccgcccaat

SEQ ID NO: 10629 - DNA, 510 bp, Canis familiaris
  misc_feature (1)..(510): n = a or c or g or t
ctcccgttacacgccnnnnnnaccacccacagcccggnngcngcgnnnngcctccgccagactgaccgccaggcntgcagcgcggtgccannagacatacccgcgncgtggctgccgccgccgccgctgacgccccgcaccgtgcgccaccaccagactgcggcctccagcgatnngagctcagccaagaagtatctgagccggccgcggtccccggacactgattccagcagcttgccacccacccccgcggaggggccggccagcctctcgcctccagtgagacccgttgcacccctctccacccagagacctcttctgctcctgccagatggccaccaggtcccaggggtgcctggcagtcgggtccagtcactcgttttccttctcctgtggacctgtgcgttttgcccaggttcctttctcaattcgcagctgtctctctgatgtgtgccttttgttcaacacaataattaacccctgcactctgcccagcccttccacactacc

SEQ ID NO: 10630 - DNA, 452 bp, Canis familiaris
tttaaagagaaaaatctcctctaatccggtattcttaacacaactattttcatatattcctttttggttcttattcaaatgcatatattttttaagtggttgttataggttcattttcacagtctgatttttagcttaatataccataaaacaggggatccctgggttaaataaataagatctttaaaaaaacatatatatacaccataaaacattttcctgtgttttagcagtcttcataattattctttcagtagccacatgatattctatcacgttgatgttctataaattatcttgtttgcattcaagttgtttctgctttttcactatttgagattatgctgtggtgaaagtctttgcgaatataactcttcttttctctcgagttactccagaaaagattggcagttatgggccagaagacacaaatgttacacagttttggtata

SEQ ID NO: 10631 - DNA, 473 bp, Canis familiaris
  misc_feature (1)..(473): n = a or c or g or t
aaatnnngcaaatgacaactgacctnnagacatacaatgatttgccagctttaaaatcagcaggtgaagaaaagaaaaagaaattacatcaggagagaacagtattaacaacccgcagaaatgcctttaagaaaataacagagaagctaaacatagaatatgagacattaaaaacacagttgcaagaaaatgagacacattctcagcttacaaatttggagaggaagtggcaacaccatgagcaaaataattttgtgatgaaagaattcatagcaaccaagagtcaagagagtgattaccagtcaattatgaagaatgtgaccaagcagattgcagaatacaataaaagcattgtggacgctctacatagcatgagcagaaactgagtctgaaccaactgcaagtctctataatagtatgctttctgctaaactgtatgttgactgaaaaagaatctcatacccttgaagagt

SEQ ID NO: 10632 - DNA, 454 bp, Canis familiaris
  misc_feature (1)..(454): n = a or c or g or t
agttnnggggggagtagatgnnannnnanntcaccnctacagcatctatcctcatggatcaactgataagttgccttatgtcaccatgggnnctggttccttggcagcaatggctgtgtttgaagataagtttaggccagatatggaggaagaggaagccaagaagctggtaagtgaagccattgcagctggcgtcttcaacgacctggggtctggaagtaacattgatctctgtgtcatcagcaagagcaaactggacttcctccgcccgtactcggtgcccaacaagaaggggactaggtttggccggtacagatgtgagaaagggaccaccgcagtcctcactgaaaaagtcaccaccctggagattgaggtgctggaagaaacagttcagacaatggacacttcgtgaatggcatctgtggatggatggttactgctctacaagattggg

SEQ ID NO: 10633 - DNA, 501 bp, Canis familiaris
  misc_feature (1)..(501): n = a or c or g or t
catcacctgcccccggggatcctcccatccccccgggtcagccccagcgnctcggacctgagtcctgtgatgccagcagnctgcgtnnnaggtctgcgtgctgggggccccgtcgtcagcgccctggcagggaggacccccagcccagctctgattcagaacatcgccacgactgcagagagcacggcctggcggttccgacgcgcatctgtccgggtccggtccgggggcgcagtcccgatggcgcgtgccgtggcccccaggagtcgccacccctgccctgacccggccgtccagtacccccgctgcttcctgtcgccgtggatccctggctcgtgttacgccgacgcccccagacaacgccgactccctttcccgcctgcgttcgtcccaccccagggtgactacctgggctcccccggccgcgacaagctgataggtgccgggtgcgcacgtgggtcactcgggctgccccacgcctggggagttcccagtgtgggg

SEQ ID NO: 10634 - DNA, 532 bp, Canis familiaris
  misc_feature (1)..(532): n = a or c or g or t
tttttgggttttttgttcatttgcttaacagttagagggctacattgttnnactcacanntaattaatgatcagctgtagaggatagtatttatatatgtgacaatatgggtttgtaacattagtttaaaaaagggaaagtttcattctgtatattttgttaccttttacagaataaaagaattacgtattaaaaaccatgtaaccatggcacttgatctgatgtgacctgaagtggtaatgagggggattaactgctgtaatcacatctgtaaaaatgacttgtctttgagtgttctgtgtgcatgtaattgtgcacatttcagtttcctatctgagcttatttgcaaaatatacacatgctgtgtggataattcagactccagctatgaagggactcttccaacctggtgttgtctccacaagaagaacccattctgacctagccagttgtctccctcatccctgcgaacctgctgaaacatcagctctcgctcacttttcatgctcggctgtgtcctcttcctttttgg

SEQ ID NO: 10635 - DNA, 565 bp, Canis familiaris
  misc_feature (1)..(565): n = a or c or g or t
gtgatnnngnnncaggtgacccacagaccatacnctgaaaaacactaaactggccccagaatgctaagcatagccaactnctgggatacattctagggccaagcccacatcatcacagggcttctcaaatggctttagtgatacagagctctatcaatactatggttccagaaaaacactatagtggaccctattaaaaataggtaggagaataaaaagcctctctctctctctctctctctccacacacacacacacacatgcccatacacagtgaataaagttctagaaggtatctgctcccaaagcaaattggatctgtcagctaaggtcaattctgtgatgactttatgcagacttcaacatagttccagctagtcctgacagccctagtactctcctttcatagtacctggccttttcataaattgaggtatttaaatatatgtttttctggcctctgtgttctatccatacattgagaaactgatgcctacagagaatcactgcctctgtataatctatagactgagaggggaggagtgacagtaattgttcctttgtt

SEQ ID NO: 10636 - DNA, 453 bp, Canis familiaris
  misc_feature (1)..(453): n = a or c or g or t
gcggggacnnnggcggggacggcggcgnggacggcggcgacgcgggcctggccagcgcctcggcgcaggggcaggcggagaccgtgcggcagctcctggaagccggcgcggatcccaacggagtcaacagcttcggcaggcgcccgatccaggtagctggggccccggggcctcgccggcagggggcgcaggaacgcaggggagcggcctccgtgggacgcgacggggaccgagagcttcgccgacgtatctgcgtgtctcctccgtgaggccgtggggcccagnnnncgcgcaggttctcccccaccgacgatcctaaagaaagggatcggaaaaaacaaacaaacaaacaacaaacgctacttaagtttggttttctttgcagcggtggggaaatgtccatactctctctcccgtcccgtgatcannnntgcaagggatagannnnnntgg

SEQ ID NO: 10637 - DNA, 572 bp, Canis familiaris
  misc_feature (1)..(572): n = a or c or g or t
cctgaaatgtgtacttgagttgactttnnnnngatgtggttcagcatttaaggaagtgtctgtgcccannnnngggggtttgcatccttgctgtgtgtgaactgtgtgtacttcagagacagcaggctgtgcggggcccgnnagggggcttgaggcctggacaccacagtcggggctggggcggtgcctagcaaggggcatgacagagtcacctggcttctccacggctgtggaggaagagggagggcgtctctgcctgcgagcctgtggctgtaagagcacttattcttataagaatctccacagttttaaacatcctccaaggcttcgcaggttcttgctacataagtgttctgcttggatgaggctgaggaacttgggtaatcttgcacgaattctggaggtccgcagcgccttctcattgttaatattcagcgttatggtggggaagttctatgtgcttgttttttcagtagatgacacaatcttagtggttggacaaaggctcttcaaaaaactgtgggtttctttttttgctattacacatatttaaggcatgcatgctatggaag

SEQ ID NO: 10638 - DNA, 562 bp, Canis familiaris
  misc_feature (1)..(562): n = a or c or g or t
tgacgcccccacgagnngactccacctggctgctgctgcnnaggatcagggcngagtcaggcaccagggggctctttgcaggctttctcccaaggatcatcaaggccgccccttcctgtgccatcatgatcagcacgtatgagttcggcaaaagcttcttccagcggctcaacagagaacagcctctgggcccttagaaggagatgggacaaggactccatcttttccatggattgggacaggtcgtgggtggaaggagactgagccaagtgccttgtcctcagcactgagggaaggggcctcatttcccttccccctcaactctgagccccaggggtagggggctacccctctaggcctgcgcaggcccccccaaaacagctttcttcctgccatttcacattcccaagccccaaggataatcactattccacccccacccccaccccaagttgaagaccaaatctaactgacccctcccttcccactgttttcctgtgtgtttgctgtagctgggtctgctcccaggagccacaaaaccctgggcctggtgtagtctgta

SEQ ID NO: 10639 - DNA, 557 bp, Canis familiaris
  misc_feature (1)..(557): n = a or c or g or t
ttcaggggtanctgngttagnccctgcttgactcctcaccccactctctatcagagcctccacactccagaaccaaagaaggtgcttggccatattggccttgagcctgcctttaaatctaatttcttccatgtcccattcgacacctttgctctccttctggaaactggcatatgtgccctggtgggagatcatctgggagacgttatctggtagccaggatattaagactccgggaaatttttgtgatatataaggttgaagggagaaaacactgaaaccaagaccaatttcagggaagtgcagctgggaccagtgggactgcccaggggaggctggcgctggcggtgagggcccgtcttccttctcccgtgcagtgtgcgcacaggctgcagcgggtgccaggctgtccccagccacaagctctccgcccagagtccctggtggcagctgcggagggtggccaacagggagagcaatgacagggtacaggcagggggatgggctgtcccacctgggtggttccctgcgctaggggttgggactctctgggaatg

SEQ ID NO: 10640 - DNA, 412 bp, Canis familiaris
  misc_feature (1)..(412): n = a or c or g or t
agcgnnctcacgatgcccgacgtggactccacgataaagtcaccatctccatcatcgcccccctggaaggtgtagaagactctgccgttgaggccggagtcacggtcagtggctgagatctgcaggacactggtgaagggaggcacatcctcatagacgctgccctggtaggagtcacgcaggaactgaggggcattgtcattcacatcgttcaccaggatctctaggacttgcactgtcaccaagccagagacgttggagagtggggggcggccaccatcctgtgcccgaacccggagggtatactccttggtcgtctcatagtcaagagggctcaccacgtccagagccccggtctgggcatccagacaggaacacagcagctgtggcactccgtggacctgggtcccga

SEQ ID NO: 10641 - DNA, 719 bp, Canis familiaris
  misc_feature (1)..(719): n = a or c or g or t
atgctgnagtgagattatatagtaaagatgatgaaccagctgtaaaattacacctactacctcataaacatgatatcatcacacttcttggtgttgnaggccattgggtaacaacagaagaaaacctgcagttggatcctccagatagccattgccttttcctcaaaggagcaacggtggctttccttaatgacgaagtttggaatttgtcaaatgtgcaacagggaaaatatctttgtatcctaaaagatgtgatggagaagctatcaactggagtttttaggcctcagttggatgaacccattccattgtatgaagcgaaagtttccatggaagttgttcagaaaaatccaggaagaaaaaagcaagttgttcaattttaattttgttctttctcagacctcagttggataaaccccttccagtacttgaagcccgagtttccttggaaattgttcagaaaaggaagataaaagcaaagtgtccggttttcctaggagtcaagatactcagagttatttaaagtttttgagaagtcacttgaaaaattattgtacaaatggtcaagacaactccataattaacatctaaagggattattccgaaattcttgctcgtttctacacatttgcctttgttacaaaatccttcccatgaagaaaattgctttcaggagaagccgcgctactctattgataaagttggtagtgtttnnnnnn

SEQ ID NO: 10642 - DNA, 592 bp, Canis familiaris
  misc_feature (1)..(592): n = a or c or g or t
atcccaaccaaccactctgattccacntcattccatggnnnnngctcaagaatctgtcagggaattcaaatgagtggnntgcagtgnngcgctatggcaaaggcctatgtgacgctacaagggcacggcagttagcattcctctacagcaacccaggggccagccgcccaaagccacccatcacccagcactcggagttgctgccactcccaaagtacagaggcagccacttacccaaagggctcagggcagccgccacactctccccgacattcttgaggaaattcacactgggatcctccgatggaccagaaactttggttttcaaagaaacaaaaacattcaattcaaagcagatttctcaaggacttgaacacctgttacaatcacatcaccttcatcacaggggccatccatccctgggaccctgcccctccatcgccaccattctgggctgctctgtgacactgctgttcagaagccgggggggattcactgcatggggtatgaaatatggaccccattctagctcagatgtcaaatatcaaacaaacaaacctcctcaccttggttccaaagaacaaggtaaacc

SEQ ID NO: 10643 - DNA, 579 bp, Canis familiaris
  misc_feature (1)..(579): n = a or c or g or t
ccccctgtgattcttccatgtgtttctacacatgaaacagatcttgtgatattttgccacagtcgttttgattaacacagnnaaggcagggtaaagcggttgtcagggcacttatgacccgagaagtgactggataccagaagaggaaacggagcttcttcaggaaaacttgcaacgtgttcttccccttacggactgcgttgccctcctgccgtcagaagagtttctggtttgcgttttggaccgttgcattaaaagaaatgcaaggaaattgggaaattgagctgttcagtgaatggcgaccgcgttcgattcagcaccttggacattggaaaactaagcctgaagacccacacttgaagacaaacacgaagaagactgtcgagaagcagccacgtggttgtaggtgtctgagtctgtgggggccttttctcttccatgtagcgtagcggcttaccgtagcagtcggagcgcaggtagnnnnccactgtcactttgtgtacccgcgggttttccaatctctgtgtagctagcggttctcttcgtgttagtatggcagccgtgccagttccgcatttg

SEQ ID NO: 10644 - DNA, 489 bp, Canis familiaris
  misc_feature (1)..(489): n = a or c or g or t
ctctctagctgtcaagatatgaggtagcatatcttcaaggtcagatggtaatgttaataacaggaaaagagagccagattttcagacattcagcagtttagcaaccctttccacagagttcattcaataccttgcactgatatagtatgtcacacttgtcaagatattcttgcatacatggtaaaatgcctccttgcacaatttgataaaaacatctctactactttacttctaaatttttgtgtgtctttaggggcaaggatattcttttttttgggggggggcaaggatattcttaaaaataaacttttttaaggctaattttgattttggaaattcaaagaaaattgtaaaatcataaatccnnnctggtgatattcctattaaagaaaaaaggttcttaagtttataatgggttgtaacattccacactatttgtttatacaaataaaagccaaggttaaaagccttgttttacttgttctgtgg

SEQ ID NO: 10645 - DNA, 653 bp, Canis familiaris
  misc_feature (1)..(653): n = a or c or g or t
gatcntngaagaaggcaaagaccacacnnagctagnctggcgncctagcgggatcccggaagaagacgtgcgcagtgccatggtgccctacttcctgcagcagcggnacgcnttacagcgcngtgttcacaggcaggaggctgaaaacagacaactggcagaggctgtcctggctgggcgccggcgggtggaggagctacagcagcaaggccaggcccagcagcaggcctggcaggccctgcgcagagaacagaaggagctggtgggtgtgctgggggagcctgagtgaggagacggtggccggatcaggagcagatggtggtcaagggcctgggggagctgcctctcagaaccaccgagacatgcccagtcctgagtggggatgtaactagctggaggatgaggcctgatcatccctcctgactttggggctcccttggggtcacacgcatacagacatgaccttcagatccttgttttcttatccttttgaggatggttggccatctccctcccatgctgggaaccaggcagcaggctttccatcctctaggccagggccccgcccttgcccactccagagcgccccgggcctggctcagggaatctgtgtctggtctgcactgattgcccccttgctggccagcctgagg

SEQ ID NO: 10646 - DNA, 415 bp, Canis familiaris
caccaagcaacttttcttttttgaatgtagacctcccccttgtggtaacttgttccttatgcatattagagccacattttctattacgattcacttcattctatagagcaacctgccaagaattatacccctgattgtttttacaactaaaggaaggaactaagtatactaacagagaaaaccacagactcctagaattctttaggaaaggaataattcaggtcatcctagagttcatattgactttcctgacttgttctcttatgggtcaatagggttggcaaggtccttggtttagtcttaaaagaatactgaattgtattaaaagtttttgtaataaaaacttattttggggacacttgggtagctcagcggttaagcatttgcgtttggctctgggcgttagcccagggtc

SEQ ID NO: 10647 - DNA, 579 bp, Canis familiaris
  misc_feature (1)..(579): n = a or c or g or t
ctggcacatctgcaccttggggcctgggctccctnnntctgtgccagtggctttcaagcacctggggagggcctggggtccctgctggatcccaggcctgtccccctcagcactccagctgcccttnctggggcagggacttgagatcccattctttctgagcaaccacctccatggcccaatttgggaccactctctcttagtcccctggctcctcaggaccccggagtgggaggctctcccacctggccgtcccccccaccccgagctctaggggcctagccccacccgtcagtgctggtgtcagggcactcaccaccaagtgtgggggccgcacccctcaccgtgcccaccatctcttgtagcccctacctgcaccctcaatgctgcacgggcccgccccttggggctcggcaactaatgtgttttgtccccagttaatcaccattctacagcctggctctgcaaggggctggggctgccccgccgcccgccatctgctgccctaggcttcctgactccattcgtccaacacttgtgacactccgagaagtgctgtggtctcagcaatgcacctgt

SEQ ID NO: 10648 - DNA, 493 bp, Canis familiaris
tttaatagttgaaataccctgttttagtccctaagaattctcattgcatagtatatgccagactataaaatacttatttttaaaatgaaatctatatattgactttcttatcaatcatcttattgtgcaatcaaaattagatttctttgatttgaaaacaacatttagagcctccaaataacttttcaaagacttattcagctttgtgggtggtattttcatgcaaacaagtaagggtgggttttatattttgtagaagtttttggtcctattttaatgctctttgtatggcagtatgtatatagtgtgttaaattcctcaaaactcttctttaaaaactttgaagttaatacttttgtgtaactgtgttttgaataaagccatgacagtgtttaaaaaaaaaaatgcagcactcctgattatttttattgtttctgactgtttcaaacctgtttttttttctgtgactgctgtaatttaaattaaagttttt

SEQ ID NO: 10649 - DNA, 532 bp, Canis familiaris
  misc_feature (1)..(532): n = a or c or g or t
ttcatcntccttttaagaattangtanntcannnaatcagaacagagtnnctggtnnnnncaccgtcatantctgtagtttcttnnagtgcttggaaatctagattctgcaaattcaagaaaatatgtcttaacatatatatcacaccattacaaacaatagggtgtttttcagacactttgctttcttacccggcttccacatataagcaattcaatttcctctggtctgaataaatactttaaaggagattcgttggtcaccatatgaaaacctctccgaaaagctttgaactgtttttctactgatttattgagaatgtagtcagaatagagattgacaaattcctgcagaaaacattaaccacaagaacttcttataatatactatacaagtaaaacacaacaagatactgggctgcatagcttgtttttattttcccagagaaggaatgaacattcatgaatatttttaaagattcatattttacacatagaaaggaaaatacaggcatacctcagagatattgtga

SEQ ID NO: 10650 - DNA, 555 bp, Canis familiaris
  misc_feature (1)..(555): n = a or c or g or t
agaaagaggannagcggcttnnnctggaggaggaacaaaaggaggaggaagagaggaaggcccgggannagcaggcccagcgagagcatgaagagtacctgaaactgaaagaagccttcgtggtnnaggaggaaggtgtgggcgacaccatgactgaagaacagtccaacagcttcctgactgaattcatcaactacattaagcagtccaaggtcgtgctcttggaagacctggcttcccaggtgggcctgcggacgcaggataccataaaccgcatccaggatctgctggctgaggggactctgacaggtgtgattgacgaccggggcaagttcatctacataactcccgaggaactggctgctgtggctaacttcatccgacagcggggccgggtgtccatcactgagcttgcccaggccagcaactccctcatctcctggggccaggagccttctctccagtcccccgcctgatctagcccttcccttttggactgggagctagcacagcctacctggccatacatcttgatccctccccaccaccctgggg

SEQ ID NO: 10651 - DNA, 637 bp, Canis familiaris
  misc_feature (1)..(637): n = a or c or g or t
gtagncattgacagaggaatgnnggnnnacattgcatcaggnatggccattgaagnnatatgctatgcccagaatatccccacccaggaccggctagagggcatggcagccttcagggagnagcggccccccagatttgttggcaagtgattcccatttaatataagtatgggagatgcctgcgttccagtgcaggatccagaaggaaaatttgtggggtgactggtctcatcatttcacctaagctttagtttcctcataaggacaaggacagatataaaaccattggcatggtgtttgatactaaggtacatgccatctacagctaccttcataattcctcatcctggctagataatcactagggtcaagttggctttggagaatgtctctccctgctcgaatggtaaactacggattaaaacagaccactctgggcctttgtattgttggctctcaggcttgatctttgcctcttagttatctggtgctcaccagagatggcaaaatgttgttaagaaccctccagtttcttcctctgtacaataaatacagaaagcctggcagtggttgactaggcatctggaatcacactgcagatcccaactctctgccagagagttcctctctgtgtgcc

SEQ ID NO: 10652 - DNA, 502 bp, Canis familiaris
  misc_feature (1)..(502): n = a or c or g or t
caatttatctttaaactctngagcaatttgtgtacaattaagagatttctgaccttttattcttacactaagttgatcaactttagaatttagacatctttaacatctgttgagttttgaatctctccagaattatgtagatagcttttatttctgtacatttaaaatatccatttagaaaatatctacaaggtaaaaaatgagaagaaatagcaatgtattttttcatgaacattttgatacacatttcatcaagttttttgattaaccattttcttacactggttataatcagtatttgattcagagagggaagcattcattattgatatacaaaatatacgggcttttaaaattccatcctttataaatgatcaagattggggctatcaaaattatatttttatcatggaaaaaatttcaactccctaagtcctaatgttgaacagaattggaatattttctttagaattacttgaaaagacaaatgaaagcttattat

SEQ ID NO: 10653 - DNA, 546 bp, Canis familiaris
attgctgtatacacacagacacacacatgtatgtatgtttgttaccaagacctgggcagacctggagaggttatttgtaaacactggacagatggagttaaaaagagatttggcatgaaggatatggtgctctatttgtaatagaaactcccaaggctcttccagctcccctttctctccatactttagctgtagtcacgaatactctccatgattttcaaaattgattcccctgaaagtgcaaagtggacaacttctaaaaggtatattaataattattaatgcccctgttcccacaacagattttaaagtttctcccaagcccataacttgcctgttgaactgtggtaaatgggtggaaagaggagtttgctttttaagaccagactccttaacaaaagcacctttgcccataggaagagtgagtatcagactcaccctagagcatattggagtcatcttctccattactccaaatcttcctttttatttcctgagcctggcttggaccttggcattccgtttgaattccttcttctaactgga

SEQ ID NO: 10654 - DNA, 551 bp, Canis familiaris
  misc_feature (1)..(551): n = a or c or g or t
tgaatatttatngagtgtatttatttgannnnnnntccatnnagnnngcantatctnnnnnnnagtgatcaaatgtgataggtgtcacatagatttcttcgttctgggctcggcctgtggctcagagctccactggggcctccctttgacatcccacctcacccccctttccagctcccttcctatcctgacctctggccctcctggagcggggagcattgagtgtgggttgtattgcaaacccagtccacgtctagtggccagtgagtggtggcaacatcctggctgaggcccagtctgctggctgccactcccctacccacccaattcccatgtactccgtgggtggattgggggcgcagaaggggggactggcagctgcttggagctacagctctgcatcatggactctgaaaactacatcttcctgagacctgaaggagaaagtctggctgttccgggttctgcccagaagcagtcctggcgggagaagaaagacactggattatcgaagtggaactctgaccaccactcatctgtgccccagatac

SEQ ID NO: 10655 - DNA, 617 bp, Canis familiaris
  misc_feature (1)..(617): n = a or c or g or t
tctcggggctgnnntcgggttcttgccccacacagagctgaactgggggaacgcgctgatgttttgagatcagatacntgtttnnnnnnagatnnntgcnnnnnnnnngatgggtagcgtgtcctcgttggtgagcattcnntctgctctgagctgcttcagttgaannnngtgctcctcccacttggccacgaaaagaggaggaaatttnggcgggggcctgcctcctccttgccttcaggtgttctccgccagggctggcatcgggatggagggtacttgaaggggggtgggcggccaggccaaaactttgggtaaggggcccaggaggcccttagcccggcgtccacccaccggccccaatctgggagccgtccagcacctcctcagggatggccgcagccacgtcttccttctgcccacacttcccgcagatgtggggtcctcgggcagggcccaaccctgggctgcaagcagaagagcagccttttgccaggagtggaagccagctgaacggagcctgcggcaagggcctgacacccagccacttgcccacgtgccagggcccaccaactgctctgtcttgtccagctccctggcatcacaggagtccccca

SEQ ID NO: 10656 - DNA, 232 bp, Canis familiaris
  misc_feature (1)..(232): n = a or c or g or t
gggcagctctgaccaggaaacgaggnngcacgnntcccagatcannnannannnnntcccccggtccctggggacctcgnannnnntgtacangnctgnnnnccgggggcnnncgctggacagggctgaggtgnnnaccagcaagctgcaggactgagcccgggctcctcacctagggggctgcaggcagcaggtgcccgcgccctgaccccagccnnggagaaacagggca

SEQ ID NO: 10657 - DNA, 563 bp, Canis familiaris
  misc_feature (1)..(563): n = a or c or g or t
agggtggctaatcgagatttgctaagtagtgttgcccgtgaattttctggaaatgttgaaagtggtttaaagactatcttgcaatgtgccctcaaccgccccgccttctttgctgagaggctctactattctatgaaaggtgctggcacagatgactccaccctggtcaggattgtggtcactcgaagtgagattgatcttgtacaaataaaacagacgttcagtcagatgtatcagaagaccctgggcacaatgattgcaagtgacacaagtggagattaccgaaagcttcttctggctatcgtgggccagtaggagagattttctaaataaatgaagcatatccttcaatgacttatctgcatgcagcaatatcaaccatcacctaaccaaaagagctttttactaaggactgtgtcagggtattgtgcttggtttgcacatgtggttattgccttaattcttttttttttttttcctctacaatcaatgtgaagccatatcacaatgatggtagtaataatgcaatgtnnntaaggcataatnnncantgttcttattct

SEQ ID NO: 10658 - DNA, 648 bp, Canis familiaris
  misc_feature (1)..(648): n = a or c or g or t
tttccttactaccttcatcnnggtgtcctttgcatctcagctgtttccaaggacccggaagcacaatttggtgtcggccttcatcagcttcctcacaggctggccaaggccctaccctgggaggctcccatcacatggaggaggtggaacgctcacagtgggaaaatcaggggtctgtgccttcctggccttgttgctgcatgccctggagatccagaatctgaggatgaagcccaaccccccccagttctccgtacagtggccttactacgtccttggctttgccattcttctgtttatagtggctggtgccatctgcctctttcaagaaacagcctgccttggctgccatttgttgcccaactcccagagtatggaggagacccaaggggtcccacacctggagaatctggagagtttgggaggagaactgagctcaatacaaaaggagacactgctgaaggaagaaacaattatctagtccaggagagcatcctccacctgtcatccgctgtgtgagtggatttgtggaggcccgagtggcagccaatctctgtggcttctgttgaacttcctgagtgtcacttccccacactcacagtgattctgtctggcttgtatttgcaatttggtaaaagtttttnnnnn

SEQ ID NO: 10659 - DNA, 568 bp, Canis familiaris
  misc_feature (1)..(568): n = a or c or g or t
cccacaactcacaaacattcctccagcagcctttttattccccccctaccacacccctcaaatatagaggtctgctttgaagtggagactgtttccaggccttattgagaccagaccctggagccccgctcccccctgccctgctatggcgtttcctctaacagggactggctcccagcttcacccccatggggttcctctacccagaaccagctttcctaacctaacagagaccaaaggccgcctctgcctgggggggcggcaggggggagtcctcctctttcactccaacttgcctgctgccccctttgtcttcctgcttccagctgggcttgggagtgaagtgggagagagacccagcacctctttagtgcctaagccctggcaagaggccttgcctgaacgccccctcttcccagaggctgcccagacctgggcctgggccgtgcgtgtcatcgtgttgctgcagtgcccaggaagggctgagcctcagagaactggccgccgccccaagtgttttctggggagactgaggtgtgctgccctnnngtctcacccgctcctccaa

SEQ ID NO: 10660 - DNA, 606 bp, Canis familiaris
  misc_feature (1)..(606): n = a or c or g or t
ggttcacccagaacctgncngcattccgtcgagaagtcaacgactcgatgaagaattccacttatggcgtgaatngcaatgacatgatgagctgacacctccttggactctacctgtacagngcagcgtccctttggnctggcccagaggggcaaacaattacaagggagagggcctggctgaccctggctccctcctccaggggtgtggggaaactggcaaagtcaactggctacttccccaaggaataggggtgtgagtgcactcactagggggcagggcgctgctggttcctggggggttgggtgggaagggtggtgggaggagatagagacacaaatgtgtgagactccagcccctcctcctggggccaccccagggggcgggggggcggggaacccccggtgtcctgccacaacctgccttgtataaacatgtacattttttcataacattttgaacaaggtttatattgactcaagtttaaaaacaaaaagtgtgactgaaaaatttttacagagtctagtgcaccaatgctgatgtgaggggttatgtatgcgagtgaggaaaaaatgtgtattctggtggcctgaagctttactggac

SEQ ID NO: 10661 - DNA, 492 bp, Canis familiaris
  misc_feature (1)..(492): n = a or c or g or t
cagtctgcagaagcgagacccgtgactcagaaagacagacgttgtggtcatttacccccagatgtgccatccgcatagtgctttttcctctcgccctttggcttgtttcaatttcacaattatgtatttaantctcaaagtaatatgtatccgtagccatttgttgacactaatacagatgattaaggaaaacagctgatctttggggaaggggagctaccgtacactttacacacacacacgcagccacaccatatatatacatatatatattatattatacatatataatatatatattatatatattatttgctttacagggaatttttcagggtttacaagagaatatgtgattggtagcaagagacacacagaatgtttatgaagaaactgcattttcttttttctttacatttgaacttctttatagtttaaatattacagtcttgagatggcacattcctacannnnnngaaggggtcttgagac

SEQ ID NO: 10662 - DNA, 705 bp, Canis familiaris
  misc_feature (1)..(705): n = a or c or g or t
gatcctcacagctgcccacaccctctaccccaaggatcatgatgcacaaagcaatgccactgtnnatgtgnncctnnnccacgtaagcgtnnaagagatcacaaaactagnaaaccatcctgtccgcagggtcagcattcacccggactaccgccaggatgagtcccacaattttgagggggacattgccctcttggagctagaaaatagtgtcaccctgggacccaacctcctccccatctgcctccctgacaacgagaccttctatgataggggcctcatgggctatgtcagtggctttgggataatggaggagaggctttcttatgacctcaaatttatccgtctgcccgtagctaaacgagaggcatgtgagagctggctcaggaaaaataaaaggaaggatgtgttttctcaaaacatgttctgtgctggggacccatctctaaagcaggatgcctgtcagggggatagcggaggggtctttgcagtgaaggatgagaacagtgatcgctgggtggccacaggcatcgtatcctggggcatcgggtgcagcaggggctatggcttctacaccaaattactcaactatgtggactggatcaagaaggagatggagggggagggctgaacccagaattcgctagatcagaatccagagagcagtgcattaaaaaaaattatctgataaccactaagaatcct

SEQ ID NO: 10663 - DNA, 416 bp, Canis familiaris
  misc_feature (1)..(416): n = a or c or g or t
ttcagcnnnccngcgntnnngaagggctggatggacagggtgctgtgccaggggttcgcctttgacatcccaggatnnnnngattccggtttcctcaaggatanactggccctcgtctccttaaccacggggggcnnagccgagatgtactcgaggagcggcgtcagcggggactttcggtacttcctgtggcctctccagcatggggcgctgcacttctgtggatttaaagtcctcgccccgcagatcagttttgcccctgagatcgcttctgaggaagaaaggaaggccatggtgacatcctgggcgcagaggctgagaaccatctgggaggaggagcccatcgactgctcgcctccttggtacttcgggcagtgacccttcgtgccgcgtccgcgtcgcgggagctgcaggca

SEQ ID NO: 10664 - DNA, 456 bp, Canis familiaris
ctgcggggcttcatcccacatctgtgatcactgattgttgatgaaggcagactgctcacagcatcagctactctctccggagaacatttatcctgttctctatttctccttcatcctatttttaacttaaactactcagatgtttgaaacttctgttctcttggatgagatcactgtccacaagtggccaacatggtacacactgagcagtggcccctctgaatgttcactttattagtcatgtatattttaaatgctactatttgatgaatgtaagtttccacattgttgctatttctgcgtttaaacataattgggaacaactgacattctgtagtcaactgccagggccttagacttaacatgtccatttctgttcaggtacagctttttagagcaagggctgcatctagctgctttcattagagaagtgtgtgtgttaaattcttaatgttg

SEQ ID NO: 10665 - DNA, 615 bp, Canis familiaris
  misc_feature (1)..(615): n = a or c or g or t
gttcaaaacttcactggactaantctatattttgaaatttgtaattatttaacatagactaaactgacatgaagttttgtatttctattaaattcaagaaactaactattagaatatatcagactatagaaaaaaattttaaattaaatccaagtctaagtgatttccacttaaggtctctacagatttttttaagttaactttattgtataatttacatacaataaaacgttcccatttaaagtatacaattcagtgagtcttgatgagtagatacacccacaaaaccaacactccaaccaagatatagaacatttccatatgccctagaaagttcttatgtgaacgtgtgcagttacatctctcacctgcccccatatcaggcaaccttctatcggatttctgttgctgccgataagttttctttgttctaaaacattataaaagtggcatcctacactatgtattcttttgtgaatggtttctttcattcagcataatgcttttgagatttgtttatgttgctatgtaatgtatattaatgatttacttcctatttcaaagaatattccattgtatggttataccacaatttgttgtccttctccctaactt

SEQ ID NO: 10666 - DNA, 598 bp, Canis familiaris
  misc_feature (1)..(598): n = a or c or g or t
tgnntcggtgccgtgactgcactgtgcccgcgtgtgatctggactgtggctcccctgccaccacacctcacgcttgcccactggcactgtccactccccaccgcgaggcttttggcggagagccccttccctggggagttcttggtgaagtcttcctgggcctcccagtgttttcatctatttcctccttcggtctgggtcatgagggtaataagggtggacccctgagataagtggaccaggtcggggtctggtggaggtgtggatggaggccgatagctgtttgggggatcatggaggtgacatcaggtagagtgacagccagatttccgtaatgaagtacagaaggggccagaaggccaacaaggccatatctcagtaagagcgcaggtgggacagctggtcgcctcttgtatagccacagggagtggtgtggtcagctgtctctgtggcatggagcaggtctgggggccctgtgagatgcatggaggagaggacacgggcccctaggccttttccccttctgctgacagcattgctgttgggggggggtggcccactgctctcccctggccctctgtctcccctgagctggggg

SEQ ID NO: 10667 - DNA, 543 bp, Canis familiaris
  misc_feature (1)..(543): n = a or c or g or t
ctgcacnnngcccctccaggtccccgtggccatgtgtgtgcacgtgtatatatgtacttgtgatttttctttgggtttgtttgtttgtagatcagtcccagaaaatttaagcctggtggggcaggagcggtggctcacccactacccactggggggtcgggcggtggggggacagcgctcacagctcccgatcagccaaacctgcctgaacttggggaagggacccctcctccccagccctgatctgcctgccatagggacgacaagggacagtgtacatagatgtgtgtattttgattggtcgttctttgagtgtttttttttttttaagaaaacgatcctgactctgccacgccctcacctcgtgcagttgccagagccctggagctggccgtgctcgtgactgtgtgccccccagcctgtggactgggcctgggccttgggatagagagaggggcgcaaagtgtgtctgcagccgcaagtgtgcgtggggctaagtgcaggggctggggacggannnnnnnctggtgcagagctagcctt

SEQ ID NO: 10668 - DNA, 692 bp, Canis familiaris
  misc_feature (1)..(692): n = a or c or g or t
taatgccctattnctnncaaagtncatatncaaataccaggtttatntactgttgnnncttgaatgagatgttgatgtattttgctttcnnnnnnnagnnnnntntgctgctccagccagtcatgcatggnntgcctccatgggtgtagtncactttcccaaaaaccacatggnacgcagaggccaatgggtgatacaaaagcattaagaatagttttannaaggnnaagnnnaaagaggagactagatgcttgatagnaaaccaataagtgactactagaaaaaaaaattgtacgtatatatccaagcatctccctcatcaagttatgaatcagttcctgatgaaaaccttaacttggagccagcttcccataaatccnaatttaaataggaaaacacggtaatgcttaacatgtcacccaagccctccaacagattactaaaatataactgaaacagtaaagtgcatatatattaactgtcatgttaaaatgtaaaatgctaaaaccactgctttttttaactactgcttcttgattctaatagtcaaattaatatgataacaaaaagttgttataatcacacagcccttttgttgacatgctgcatgtcttttaaaacatctgtatgtgatactttggttccaccgactgtatttggaatgtaattannngttttcacacacatggttt

SEQ ID NO: 10669 - DNA, 609 bp, Canis familiaris
  misc_feature (1)..(609): n = a or c or g or t
atgnntncggattgtatgtgtacatgggattgtgtggntcgctcgtgacatttcagtgatgctatttctcagaataagacacagagccaggtgctgttgaggtannagctggagagagagcaagtggcaccacctgnacgccaacacctgggtgccaacaaccacctgttatatagcagccatcgaagccttaggggcttggggttacggaccagaagccaggacaccggccaccggggtcatgtctgtggcagattccaggtgcttcttttttttctgatgggtccacggttgtcctttccctgtgatcagatgacctcagaggtccagagatctgggggtgtgctagggcttcagctaacaagagggagcacacggtgtcatcacgaacactcagtgacaggcccccaaggactgcctgaggcccaaaggacaacaccaaaaggaagaatttttaaagggagtgttttagaaggactcacgatgcaggcggtgaaaagctctattcatcctcttaggaatggggtcttgcgtctcttgtttgtcctctctgtagagcaaggtacttatctaataaatacagaagcttgaatattcgtggttccaaag

SEQ ID NO: 10670 - DNA, 637 bp, Canis familiaris
  misc_feature (1)..(637): n = a or c or g or t
ttgcctcctagcagagnagtgtgtgtgtgacaagccagttctccaagcataacctaggtgtgagactaaaagttttccttattgacttaaatttnnntaatggcaaggtgaggggtggtaggtatggtgtatgcttggatggggaagaaaagctcnnnngacctgtaggngattgtttttaagtggaantcttttaaactcagannagttacgaaaagcaaggtgaagaacatgaagctgtttctgtattcattttattccgaagaacctacgtcttaggtgaaagttatgaccaaccagattaaactctacccacatcctgtattttaaggtctaagtttaactggtcaacatttaaaatggattggngctattagtacataaagtatgatgggctttggtcccacatcttttgcatctacccacccttcaacctttgtccttcagcccccttctctcttccacattctttggtttgtatgtggtttctcagttaatatatagctaatagctcttatttttcttatgtttttaactgcttaggtnnnnctggatgtaagggtgaaaattcatttgatggaaatacttgtgtatatttaaagacccaattgctcctctggagcttgtacgttcaaga

SEQ ID NO: 10671 - DNA, 594 bp, Canis familiaris
  misc_feature (1)..(594): n = a or c or g or t
ctaaaaaaaaaagaaaaaagaaaaaaaagaaatctctgccntnnnagggctcagtaactcagcccctgtgagatgagaagcagcaacgcagatttgtgagcaggtggaggagaggggtgcaggtggccagcaccctcagcctctttaacttggcctgagtcctactgctagttaggacagagagggtcagagtgagaactgttaaagaggacaagattctgtaatactctcatgccctctcacctcataattctgatatgccaaaacatttgacctgatgagaatgaccatgaacttgctgatgcacatgcggggtggatggtagatgtgtatgcttctttcctgactggccattcactttcaggctgttactgaaagtaacagattggataggagagagttggtgaggaaggaatggagagagcaggatccctggattccctgcccccagattccttgactgtcacttgtaactgtatataatttttgtgtttcttgctccattcctcatgctgtcttccttagtctaaagtccgtgtgggaaggggaaaatgctgaacatccttgtatagtttcttcaactgtcccagccat

SEQ ID NO: 10672 - DNA, 618 bp, Canis familiaris
  misc_feature (1)..(618): n = a or c or g or t
gcatgcttnnggtttgnnannaaaatatacagtgtggtgaaggttgactgaagaagccagtgtgtccagnnaaaacagaaataaattaaattcttcatcaacaaagagctgtttttgtgactaccttgagttttatcagacttattggcctaagtaatccttgagaagcaacataattctaagtacacctcttcccatacacctgtctccacaaaatgtgttttcaacactaaaacatttgtatcgtgatttgattaagtatatattcagttctcgttgaagagcaaatttaaatattatgtgcatttgtaaatacaatagctataaaagtttcaatactgctaatggcagaatagaggaggccatatgaaacagtgctgatgaaatgcaggacagttcattgtaaataggattttctaggctcggtaggtggaaagaattatttttctttgaaggaaataactttttatcatggtaattttgaaggatgattcatatgatgtgtttattggggggctgtggcttttaagaaaatcttgtattggttgtaactgttcatatcttcttctctgtgttgacttcattattcccatggtactggccttttaaactatgtgc

SEQ ID NO: 10673 - DNA, 598 bp, Canis familiaris
  misc_feature (1)..(598): n = a or c or g or t
ggggctgtatgccccagagnntcttcatactgtgaccctgcccggtgggcagcccaggcggatcaggacattggggtccgggcttggtgtttcttggcccctcagggcaggcagagggtgggtgtggtggggacgggggccagcactccnngcggaccattctgtgcctccggggacctgccccggcagtgggagccataatcccccttctttgttcacctggtcccagcgagcaccttcccctgcagggtttctgtcctccctgagctccaggaccctcagcaggcacagggcaagctgcccgggggagcccgcagcggacagccagtcacagaaggacctgggagacccacttggagtggggccccggggaccctgccttgagcccggggccctgtcctcccctccctccgtgtttgtgtctcccatcggaggtgggaccacctctctggtagctaagtgtctgctcctcagctcccttcacgaggatctctgtctttggagcgtctgtccgtccctcactctctgcacctgctccctggtgcccctgcccccttccttgcacccctctcccacctccctgaaggnnnnnngcaga

SEQ ID NO: 10674 - DNA, 353 bp, Canis familiaris
  misc_feature (1)..(353): n = a or c or g or t
aacttttatctttgatgtcaaacaaagatgtntnngcttggtnnggcttttttagattnatctacnnatttagatnnatnnatctatctatttatttatgagagagaataagagagtgtaggagnctggtactgtgttatatctcaaaacagtcctatgagatggcattgtttatctcttgtggaggggtaaactgatgattgatgagaatatctgattgaagcctgtgtcactaggaaggaagtagggatataagcatagatttacttggcactagcaacctgcagccttccttgagaatacctcatatgtgaaaaatacccccattggattctttaagatgtatgtatgta

SEQ ID NO: 10675 - DNA, 514 bp, Canis familiaris
  misc_feature (1)..(514): n = a or c or g or t
gccatgtgttcatatatctcntgtaaatcgtttcaaatatgtnnnnnnactnntaaggccagaccaacaacccattatccttgcaaatgattcagcaatcctggaagtacgcagggaagttcaccccttgatttttgagtgtgccaccttggataataatgaaataatagcaacagttaaattcacagtctatacaacaagtgaattgcaaatgaaaagatcagctcgaccagacactgatgcagtcctagtttttgtgctgaccataggagttgttatctgtatattcgtgatctttatactgatcttcttaattataaactggggggcagtcaagtctttctggggggagaaagcctcaacaactgagatacagtctgaactgagttcaatgagatacaaagattcaacttctcttgaccagtcaccaacagaaatacctggaaatgaagatgatgctttaagtgaatggaatgaatgatgtatggttgatatataagaaaccaaaagagag

SEQ ID NO: 10676 - DNA, 610 bp, Canis familiaris
aagatgtcagtattagaaaaaggccaagattggatatagaaacaaatggcacttttgttgaagcaacaccgaaaactagtgagatatctcaagaaaatgaaattgagaagaaatgtgagctcaagagtgagtcactgtggtcaactaaagaagaactgtctatcaaagatgaacttgaggatgatggtgatatgcttccaaggaaggtgttactgactgaatttagatcactggtggttaataactctacccccagaaacgcatccagtgtaaatagtgattatgatcaaccaaagaatttcaagaaattcaaaaaggtcacatttcctggagcaggaaaacttccacgcatcattggaggatcagatctagtagctcatcatgctcggaagaatacagaattagaagaatggttaaggcaggaaatggaggtgcaaaaccagcatgcgagagaagagtctcttgctgatgatctcttcagatacaatccaaatgtaaagaggagacgataactgaagattttataaagaagtcacagaaaagcatttcctatcaagcatttacatcaagattcctctgggatacattcattaaatctctagaaaggatt

SEQ ID NO: 10677 - DNA, 274 bp, Canis familiaris
  misc_feature (1)..(274): n = a or c or g or t
tcccgcctactaggtctgccggccaggagcagggcttgtccnnnnntgggtctggggaggaagccacgcaccnngttccccgagagacccagtcctggacaatgggtggggacatactcaacnnnnnnttcatnnnaaacttgcaggnnnnccgcagcaccaggccttggtnaccannnnnnnnnccccccccacacacaccccttcaaagtcagtattttcactacaggannnnncccaagccgttcctccaantggatgtatcccttctaac

SEQ ID NO: 10678 - DNA, 596 bp, Canis familiaris
  misc_feature (1)..(596): n = a or c or g or t
tcagccacgnnggctccctatnctcagctgccatgtcccccagcttctccccttcannnnctcntnnnnntgctcgctcacccgnngtctcaccatttggggtggcccanngccnctcagnntcngcactcagcgcagagtccggcctnnngccacctgatgacannnagctgcacatctagctgtggcccaggctgggccccgacctgggatgcgcacagtgtccccaatgcaggccccatctgagcctgccctgggcagcctcggaccatgattgaccacaggggaggccagctccccatcctaaactccagtgggggcaggtcccacatctcaccctggtcctttcagagcaccagtcaaatagaggtcctactggccacggacctggggccaggtccaatgtggggagaaatatgaaggaggcagcagctctgggttctcctcagtgagggcttcctgcctcgtgccagcaccctgaggtggagctgagactttatttattggggggtagggggaatgggggaggcccctccaacctgtttgggcccagctnnnttgggttccactaacnncnctgcccctgcacagaacca

SEQ ID NO: 10679 - DNA, 478 bp, Canis familiaris
  misc_feature (1)..(478): n = a or c or g or t
gggnnagaaaagtaattacattnncttaaattgtgcgatcttaaaggcaaaagttnnnnnncaagtttttatttatataatnntcntcaaagnctcagaccagaaacattacattcattcctgattcagaaaaaaaaatgtgaaaactgaaaataattaggagcaataaaaatattaagacaggaattgttaatatgtgtatttttaaagaaattagttcttttatgggttagaaggaaaaattgggacagaatatttacnnnnnnattnnnnaaggtaacaaaaatattctcatttttttagtatacttgaattctcagtagtcatcacgnnnntacgtgctaaaatccaaaattaccttgaaaatcactggaatcaaaccaagtattagcatttctatattatatatgatcacanatattttttaaaatgtacaatgttgtatattanagtaggtaaagtttataccaaaatngcg

SEQ ID NO: 10680 - DNA, 688 bp, Canis familiaris
gtttccacattttttgcttgtggaaagactgttttcatatgttatactcggttaaagaatttaaatggaattacgtataaattaatataaaatgattacctctggtgttgacaggtttgaacttgcactccgtaaggaacagccataatcccatgaatgattgcattaattattgactatccttagtccattggaagcttttgttatatataggaacttgtagggctcattttggtttattgaaatgccatctaattataaattagctgtagatatcaggtgcttctgatgactgaaaatatatatctgacttgtgggaaacttcatgggtttccttatttatcatgtatgtgattatatatggacacatttacaaaataagaagagtgggatttttccccttcaacttgaatattatccctgtatattgcatgaatgagagatttcccatatttccatcagagtaatatacttgctttaattcttaagcataagtgaacaagataaaatatatgctgaattacttgtgaagaatgcatttaaagctattttaaatgtgttttaatttgtaagacattacttattaagaaattggttattatacttactgttctaatttggtggtaaaggtattcttaagaatttgcaagtactttagattttcaaaattgaatgagagagaacattg

SEQ ID NO: 10681 - DNA, 608 bp, Canis familiaris
  misc_feature (1)..(608): n = a or c or g or t
tttaagaaactcaactgtcaagtgattggtgcttctgtnnattctcatttctgtcacctggcttggatcaacacacccaaganncaaggtnnactgggacccatgaacattcccttggtatcagaccccaagcgtaccattgctcaggactatnnagtcttaaaggctgatgaaggcatctcgttcaggggcctctttatcattgatgataaaggtatccttcggcagatcactgtaaacgaccttcctgttggtcgctctgtggatgagacactgcgactggttcaggccttccagtttactgacaagcatggggaagtgtgcccagctggctggaagcctggcagtgataccatcaagcctgatgtccagaagagcaaagaatatttctctaagcagaagtgagcgcctcgccattttaggtccgggctgtagtgggggatccatgaaaacagaatctttttttgtactattgtcatgcttataacaagactttagactctgcagatatggtatgtggtatgggacaagaccgccctttcctgcaggggttggggaggccagcctttcttcctctggagagaatggtctgaggtgtgctatggggc

SEQ ID NO: 10682 - DNA, 489 bp, Canis familiaris
  misc_feature (1)..(489): n = a or c or g or t
tatagaaatagcaactattnnaaaaaaatcactctgttgactgctctttccaaccacacttgtatgccaggaggcagcagcctataccactggacttcccaggcagccagtgagcagttctgcccagcctgggctgggctgtggggggccctcccctccaagccattcagcttccactgtccagccggggtgcagtctggctggggaacactcagcccagttcttgcctcagtgccaccttctcctgggcaaggagccaagaactaagtttataagcaacaagtactttagataaatcttcggctttagttgccgaagagtggagaaggttgaccctcactgacgtaattctccggtgcagaagcagtgtagcgtaacgtgtgcacgtgcccacacatgcctgcgctctgggtagctctccccctggtggatccataggcacctgggctgcactttgcattcacttgtggctttactagactcactgtt

SEQ ID NO: 10683 - DNA, 620 bp, Canis familiaris
  misc_feature (1)..(620): n = a or c or g or t
tgaattcactgagaacataatgcagggactnngtgaannagcatcattagtgtccattgctgtgactgggagctgtagaatgttaggaggggaagcctattaaatgtgattttagaaagagtctctctctgtataagaaaactgttggtaaaacagtctatcctaaactagagagagatcactaatgtgacttctaaatactggtacccttttacccagaaagtaatccagttgtgttttcttctttctatatttcatcaagaggaactaaaaccctgtttttggaagcgactgggttggtctgaaccatccaggataatcgtgctggatcagagtgacttgtcagattgatgggaattggatcataggtggactcctggccagagtttgagcatcctgcttgtgagctcctgtctctcctcatctacttcagtcaccatcagggcagtgattctgtagctcatgctttgttcagctgccacaatagacagaaccactggtcctgtttgtagcacatttaacaatttgtttttagttcagatttctgaaaagtgaaaggtagcttttgttgtaaactttctcaatgtttccagaatggcttttggttttgttgattcaga

SEQ ID NO: 10684 - DNA, 648 bp, Canis familiaris
  misc_feature (1)..(648): n = a or c or g or t
gatcctattgatgtttgtgaaataggctcaaaggttctttcntgtngagaggttattcctgtgaagatcnnnnnnattttggctcttattgatcagggtgaaacagattngaaaataattgctatcaatgtgaatgatcctgaagcctcaaagtttcatgatattgatgatgttaagaagtacaaaccaggttacttggaagctacgcttaattggtttagattttataaggtgccagaaggaaaaccagaaaaccagtttgcttttaatggagaattcaaaaacaaggcttttgctcttgatgttattaaatctactcatgaatgctggaaagcattgcttatgaagaagtgtgatggaggagctataaagtgcacaaatgtgcatatatgtgacagccctttccattgcactcaagaggaagcaagatcaatagttgaactggtgtcatcttcaccgaatcaagaaagtaatacagaagatcaagtgtggcacttccttggcaagtgatggaacatttgaagtttggctatcaagactccccatctccaaggtctccacgactccctttcctccaagtgctagcaacaggcagatctatgaggatttactgatttcctgttgaaacctcattgtttttccagcctt

SEQ ID NO: 10685 - DNA, 467 bp, Canis familiaris
  misc_feature (1)..(467): n = a or c or g or t
agggnctacagatggtgctattaatagaactggaatgcagcagagttgttgcaaagggaagaggagccagattcctttttcatcctttgcaaaatagcaggccagaaaaagagtctaggattgacccaaatggaaagtaatttgtattctcaataaatatcctgggtaattaatatccaggcaaacaaacaacccactccgagaaccagtactcttggttcctagttggctaaggaaaggactgaagtcctggacagtgacaggcttacaacagtaacttaagacagctcacgtctctgactgtttgagggatgcctggaggggccaggacatagagcgtcggtggccctagcaaaccagtgttgccaacaccatcattgccaaaaggccctttgggtcctagacaaagcttggctgctggcttcactcctgctgacagctgagaagcatnnntcttccatccactc

SEQ ID NO: 10686 - DNA, 691 bp, Canis familiaris
  misc_feature (1)..(691): n = a or c or g or t
atgctgtagatgtatttgaagccaggcgagcagaagccaagnngtggcagaatgcgcccagagttactactgggcccacccctttcagcaacatgccaaatgcagcagccgttgccatggctgcaacacttacacagcagcaatagcctgctacagggccacagccatctctgggagttagttttggaacgccattcggctcaggtattggcactggcttgcaatcaagtggcttaggttcttcaaaccttggaggatttggaactagctctggttttggatgcagcaccacaggggcctccacatttggatttggaacaacaaataaaccctcaggaagtcttagtgcaggcaacaaatcacaggttttaactggatttcgaaaacccagtgttacagaaaccaatgaagtaggaagaaaaatccagttctgagcagtctttgaatcgacaaatatctactttgcaaggaacttctgattattattctatgagtctcactatttaagaatagaactataaggcttagggtgagtgtggtcaagatgttttgaattcagtaaagaaaacttgccctttgatgtttaaggatgatctaatggatcatataccagctactgagaatgtttttaaaaactaggaagttggccactaattcagtgtatataaggaactgtggaaaatttacagaa

SEQ ID NO: 10687 - DNA, 591 bp, Canis familiaris
  misc_feature (1)..(591): n = a or c or g or t
gtgctcnnacccgtgaattctgcagaggtgatctctacccacctgtcaggacttngcatgcgggggcagaggnaccgcgccaaacgctctacacaggcgtgaaaagaaannagccgcttgctgtcannagggcatagtcgtcctccaggnaggcggcactgccgcctcaacccgtgcagcaaggcttcccacgagcctgccgtcacactgaggcgccttgtgtccctgagcagagttacatgctccaggactccttggagcacgtgcagctgtttgacctgatgaggaggatgttagaatttgaccctgcccagcgcatcacactggcggaggccctgctgcaccccttctttgctggcctgacccctgaggagcggtccttccacaccagccgcaacccgagcagatgacaggcgtaggccaccgcaggagccggagtgtgggacggggccacccggccttttctccaacccccaccaccgggccccggggccagagccacccaacgaacagtgcaatgtgaaggaaggcaggagcctgcaggggacgagacttgacgcccgcccagctgccagaaagcacagatttgcc

SEQ ID NO: 10688 - DNA, 589 bp, Canis familiaris
  misc_feature (1)..(589): n = a or c or g or t
ctctgctatagtanngcnctaagaagtaacttaagaggtataagaagagctgtcaccactgacaaaaacattagccatttcctcatatatagagctatgatttttaagttgcctggcgtctgcctatcaggaatttctgaatatatagagataaatctgtttacaaactactcatccttctttttctccattccaaaactcttattaagaaaaagcaatagctctcagctattcaaatggctgccatcttttctgtagggccttgccttcttttattatataatgtctactaatgttttcttagtaagtataattttgtagggaaagttaattcattttggcccagtacacatatgtaaatatattaacttttttgtgtgtttatgatgtagtaaggagataatagagctgtatagagagatactcttctgcctgggcaatttccatctttctgaaggatgctttagcaagattctcagtctatttctatcagataattgtacttcaagcaatatcacattcagaaccaccaattttgtcaagttctggcaatagtaatgaatttaatgtgaattaaaaaaacttttac

SEQ ID NO: 10689 - DNA, 623 bp, Canis familiaris
  misc_feature (1)..(623): n = a or c or g or t
gnnagctgctaatgacaaaacaaatccttnnnctacccagccagcaggtatatagcacagaacactgtgtgttgctacaagggcnnagtgactggaaaaaggtgatccctacttgactgttccaaagagcagcttctcagatcttcagtgttcactggtaaatttctaacagtgtatttgtgtaaagtttgtcgtttcatacttcatacactacagttgccgtcactgatccctgttttgctggcttttaagctatgtggtcaaaaatcctgcttccttaaaacatagagagttaatgagcatctcaagctttttttcctttttaatgatgcctgcactatcagagtattctagtgttctctcttttgtttggcatataatcatgcacaacctttttatttctttgaggtgggagtatatttttatttcctaaatgccatactataaagatcaaattcttaagtgtgtttgtgcagctcaaaagtaaagatatattaagggggaaaaaaaaaaaacactggtctagatgcaaggcacacttaaagcaagttttacttttggttgtattttctttgtatattataaacatttatttaacttgttgcagtttgaagtaaaaaatt

SEQ ID NO: 10690 - DNA, 776 bp, Canis familiaris
  misc_feature (1)..(776): n = a or c or g or t
ccaaaaaactnacaacgtctgtgcttccgcctcagtgcatgagattcatgaatcagcattacgagccaagaacagaagacaggtnnaaaaaaggaaactggtcacccagaggcagcgtgctcactccgtgnaggtggagaagaacagacgggtgangccttccgcctccgagaacccgtggatgacagaatatatgaggtgctattcagcacgagcataagcagacacggttgctgggacagcctctttgaaaaggtataaagaaagaacaagagaaaaaccatcaaaagaaaacagagacaggtttaagaaaccaacagattatttaaggtttttcatagggaatttcctaaagactgctctgtctcgacggatcctggtcacctacctcagccgtagggtgacagttgaagccatagacatttggttatttatggagataattccctaaatatttgatattcttataagggttttgttttaaagcatcttaatcttttcagacaccgacaccgaatgcctttaaatggctacagatgcttaacattcaatattttcatcagtttagccggagcctattttcatcctgttctaataactttcagattccatagccagtaagatcattccaacttgcagcttaagacccattttccttatgtggagttttctatgtgaaagaatagcttgttaaaagtgagtttcaacactaatactgactcctgtgtagtgaaaccagaancttggtagttnnngaaaaattaaacttatnnnnn

SEQ ID NO: 10691 - DNA, 521 bp, Canis familiaris
  misc_feature (1)..(521): n = a or c or g or t
atcntggcnagtacgtgtgcaanggcacgaactcnnngggcaccagnnaggnngtcatcgtgctgcgcgtgcgaaaccgcttcgccgccctctggcnntnnnngggcatnnnnnncgaagnnctggtgctggtnaccgtcatcttcatctatgagaagnnncggaagccggatgaggtcntggatgacgaggacacgggctctgctccnnngaagagcagtgggcacgtcaacgacaaaggcaagaacgttcgccagcggaacgccaactgaggcctcccgcctccgcctggagcnnccgcgagcagctcannnnnctggtgtctgcagattccacgttctttcctctcacaggagacccgccccacgaaagcagaccacacaccgtgggtcagatcacacttttctttccttttttaaactaaactagggtttncnacatagaattccattctttagggggtttttcctttttaaacattttgtgagngtnncaggnnnnnnnnnngnttcnnnnnnnnn

SEQ ID NO: 10692 - DNA, 527 bp, Canis familiaris
  misc_feature (1)..(527): n = a or c or g or t
gtnnaagatgactgcgtggtccatctggctcccccgagtgaggagtttgaggcnnncagcatcacttctgtcttcagcaaccgggctgtcgtgaaatacagtcggctggaggatgtgctgcatggctgctcctggaagatcaacaacaagctggatgggacgtacctgcccctgcctgtggacaagattatccagcggaccaaaaagatgatcaacaagatagtacagtacagcctgattgaagggaactgtgaacactttgtcaatgacctcagatacggtgtggccaggagccagcaggtagagcacgccctgatggaaggagctaaggctgcaggagcagtcatctcagccgtagtggagagcataaggcccaagcctgtaactgcctgaaggtgctgggaactccaagcagaggaaggactcctgccattagcatggacaacatgcctccttgcctccccctgccttctctcgccataancctactcaagagaattgngagcttctcggagaatctagaatgt

SEQ ID NO: 10693 - DNA, 613 bp, Canis familiaris
  misc_feature (1)..(613): n = a or c or g or t
gctacaccagaaatgnctagagaatcacannagaccaatgaagaggaaacctcacatggcagtctttcaactggcagccatcctagagacttcagtggctgtcctgtgctgaagaaagatcatgttgtataaggacagaaacaaagagaaggcatcaagtttttgggtcttattaccattctgaccaatgtactaacttctagccaaaaggcaatctttctcctccccatagagtagccacaggctagaggattgcagcctcagtaatgaatgtgaaagtgttccaataagacaatactccttgaaaagcccctgaaatgaaagtaaagggagagcaagaagaggtattcactgggtttgcacaaggctcagagtccagatgagaagcctcaagctgcacactgggcaccaaaatgatataatttggagtttgggtccaagagcaagtgaccaagaaagaattcttgagacgttttcagtgcaaacaaaggtgattttattaaagcacagcaagaggacccgtgggcagaaaaggctgaggtctaagcatgaggaatggctgattacatagggtttcttatccaatggaagaatatgtgacattacggctcca

SEQ ID NO: 10694 - DNA, 584 bp, Canis familiaris
  misc_feature (1)..(584): n = a or c or g or t
cctgctcaacccagcaannatggctttccagagcnnaccctgtccaggttaggctctcgggcatctactctgaggaggagtgactccatctatgaggcctccaacctctatggcatctcagccatggatggtgttcccttcacactgcacccccggttcgagggcaagagctgtggccccctggccttctctgcttttgccgatctgaccatcaagtcactggcggatattgaggaggagtataactacggcttcgtggtggagaagactgcagctgcacgcctgccccccagtgtctcgtagctcttcgtcagccccagggaaagcccgctgcccagcacccctgacacaccccaggactggcagctaccccaccctgcagcatcttgggaaccttggtggtgcagggctttctagactaagccacccagtggaaccacagccctggagaaggagcaagacctgtctgcttggtgatggggtctctggcctgcctcgcccccgggccctacaaggcagaggtgggggctggatggaaaccagtgccttcaagtcannngtgtcaaaacgttccggtgcccgga

SEQ ID NO: 10695 - DNA, 705 bp, Canis familiaris
  misc_feature (1)..(705): n = a or c or g or t
cccattctnttctctctctaccatcntatnctcccttttgaaaaatgaactaatgctgagaacaggcagaaacagagtggtgacaccattcagatgcagggaagagcctcgttagagatctggtttgagctcacttcctgttgcatgtaggacatggtggatgtaaacaccattcactttgtatcctttgtgcctggagtacagaatcattccatatgtgtttggtctctaggggattatggatcattaggggagaaagcatgtattctttgaggttgttagatgtgtgtccaagtgtcatttgccaatatgctcctgctgtttgctttggtaatgtgatgttcccctttcccccaaatcccaaccatgcccctgagggtggcagggcagcagcataccaaagagatgtgctgcaaaattccagaggctgcctgggtgagttagacatggggcagctgatgtaaggagttgagaagtggctacgaaaaaaaagagggtccactgacgctggaatgaagtctgagcaagtcacagaaccctgactggaagctacagcagagacattggaatcaaggaaacatcctctctggtgaatggaattgtcttcaatggacacttggtaccagctctgagagcccttatgcctgtttcctgccagaatgtgggtcagatgtatgtattctttatcatatcagaaggacagtg

SEQ ID NO: 10696 - DNA, 618 bp, Canis familiaris
  misc_feature (1)..(618): n = a or c or g or t
cattgactgttttctcttcctgccttgctccctacttnngaggatccattttggataaattttcttaaataaaaatcataatgaaggagagaaagtttaataattttagattcgtaagaggaaaagcattcaaactgatacaaatgccatttaacaagttttctaaggcctactcattacaggctattttcaagactataaaatttcaacataaggaaatgattaacttggagtttatttttataggatttggatctgtgataaaggtcagttttcatgtttgtatccacttcataaaatgaattatgcttatgtgtttatagataaataggtaaaaggaaattttagatccattctaactctaaatccttttcactaaatggctttatgttttctagtttggaacttatttaaagttttcttttgagcacatcaggagagaaaggtgggagggaatattggatgccaggtgtaatggagtggggaaaactgttatgccatcagtatctcatggactatgatgatgatgttatctgtgtatttgtatatattgttctcatttatgcttttgtttttttagatatgctttttaatatatatcagattagattcttaaat

SEQ ID NO: 10697 - DNA, 595 bp, Canis familiaris
  misc_feature (1)..(595): n = a or c or g or t
annttactgacccaaatgagnactctgcatgtgtctccacttcacagccctgacacagnnagagnnntcccgcgaagccgtgactgcggagtngacctgggctcagaggtgtacaggatgctgcgagagccggctgaacccttggcttcggagcccaagcagtcaggctccttccgctacttgcagggcatgctagaggccggggagggtggggagcggctggggcctagcagtccccgcaaccccaagcccactgccagcaagctgggcactccgctgagcggcctgcagggactgcccgagtgcacgcgctgcggccacggcatcgtgggcaccatcgtcaaggcgcgggacaagctctaccaccctgaatgcttcatgtgcagcgactgcggcctgaatctgaagcagcgcggttatttctttctggatgagcggctctactgcgagagccatgccaaggcgcgcgtcaagccacctgagggctacgacgtggtggcggtgtaccccaatgccaaagtggaacttgtctgagctgctccaggaacctcccgtccccgcttctgcttttaatgcccccgcgtggtccgtgtaa

SEQ ID NO: 10698 - DNA, 568 bp, Canis familiaris
  misc_feature (1)..(568): n = a or c or g or t
cagctgnnnaccactnnccatgannnnatcccgggaccccaacccctccactcgaccaaggatggaccatgccctctgcgcccacccctcctgcctccctctcagaggcctgctgccagcgggggcaccagcttggaacaccttggggtccccccaccccaccccctagaacctgcaaacccagtgggcctggaatatgactgcccaggaccacggagagagagaccactgccctataagtccacactattgtagaaaccaagttcttgtcattttaacctggatccagcacttggtgacctgggctgggtgggaggggagaattcaaaacagactcacccagcccacccaggcctcctccaaggaaacagaagaaggctagcccagagccccctggacctgctcccttcacacccggactggcacgacttggcaagggaaacagaagcctaggggtgcccagcctgagaacaggagagcctagctcctctctacaactgtcacatggagaccccaaggcaggcatcagctgggaagtggcctgtctggcctggacccacccctatat

SEQ ID NO: 10699 - DNA, 505 bp, Canis familiaris
  misc_feature (1)..(505): n = a or c or g or t
tcatctcangatatggggggagaggcatagcagaagtgttgnnatagatttaactttctgaccaagttgagaggcaagttgtcttatagagagcactattgcacttagtagctatgtgattctgagcaaaccacatgatttttctaggtttttttcatctgcaaacttgaggaggtggggctgtcaaagctttcagtaagaatcagggtgaatgaaaattgatccttgctttcatcactatcttttctggctcatcactgtgccttttttttctttcctaagaaatacatcacatctctttcttctgtcctcctgcccctttccctttccccatcaaggtccaggcagattaggccaagatccagagtttcctggagtgtaatttcgagttgcttagaaagggaagcctgactctggcctctttaatcctgcagagtttcaaaggggacttggtcagggtgggcggcacttctcttgctgggagcatccntttagccagttttcc

SEQ ID NO: 10700 - DNA, 662 bp, Canis familiaris
  misc_feature (1)..(662): n = a or c or g or t
tcagaaactncgtgaatactttcattcagtttaagaagcctattattgtagcagtaaatggccnagccattggactaggagcctccatattgcctctttgtgatgtggtttgggccaatgaaaaggcttggtttcagacaccctatactaccttcggacagagtccagatggctgttccaccgttatgtttcccaagattatgggaggagcatctgcaaatgaaatgttgctcagtggacggaagctgacggcgcaggaggcatgcggcaaaggcctggtgtcccaggtgttctggccagggaccttcacccaggaggtcatggttcgcatcaaggagctcgcctcctgtaatccagttgtgctggaagaatccaaagcccttgtgcgctgtaacatgaagatggagctggagcaggccaacgagagggagtgtgaagtgctgaagaagatctggggctcggcccaggggatggactccatgctgaagtacctgcagaggaagattgatgaattctgattggcaggtgcctgctggtgacactggaattatagagcaggacatctgcggtgccaggttgcccttctccatcctcaccgcccaaaacaagttcacttttagctcacgcttggaagcaggannnnnnacatccaagctatttat

SEQ ID NO: 10701 - DNA, 635 bp, Canis familiaris
  misc_feature (1)..(635): n = a or c or g or t
atcgacccnagcgtgccctnngactccaaacgtnnnntcatccccaatatnnnnnnnnnggnnatagatgtacnaggnnnctactgtagcggctgggtgaagcgnngacccacaggggtcattgccactaccatgaccgacagcttcctcaccggccagatgctactgcaggacctgaaggctgggctgctgccactgggtcccaggcctggctatgcggccatcgaggccctgctcagcagccgaggggtccggcctgtgtctttctcggactgggagaagctggatgccgaggaggtgtcccggggcaagggtgctgggaagcccagagagaagctgctggatccccaggagatgctgcggctgctggggcgctgagcctagatcctggcccggctggcatggagagaaggtctgctgggcccgggagagggcctggggccagtcagcgggactctgcaccacagctgtgtcacctgcccaccctgcaccaggtcccgactgcctgttttccagggacctctgagcacttcctcgaggcagaaggttgccttgccagagataaccttagggatgggtggaggcgctggctgactttcctccctcccgcctctttcctgtcagactgtngaggg

SEQ ID NO: 10702 - DNA, 648 bp, Canis familiaris
  misc_feature (1)..(648): n = a or c or g or t
gttgaccagacnngactcctnggtggcgcgtcccgcacaggagagcctacagagcagcccggccatnnacgtcaagtgaccggaagggaccgctagttcccggcagtggcggctgcagcccgggaccccgcgcgtccgcgcagccctggagcccggccgtcgggctctggggcacgtgagtcgagttgaggggcctccggtggggacgtttcgtaaagatgtttgtctagaacaaaatacttagccattcgtgtcctcttagaccatttggggatgaagacatgttgacaattagcaagaaacttttcaattatctgcctgattccatcatgttttcttaacatgataacttcaaaaattaacatcctttgtaatttccttagtcttccaaggtataccgctttttacttattttatttacattttaaatatgcccacttagcaattggaacaagttaaattgttcttgattagaagtagtttggaaattttgctcctttgtttcccccccctgtgctgacttgagtcgcccggggccgcgtttgcggaacttggtccctgtccagccttcccgctggaccttttccagagactccctttgaaggcactttgtccagaaatgaaatactgtcacagtggattacttca

SEQ ID NO: 10703 - DNA, 550 bp, Canis familiaris
  misc_feature (1)..(541): n = a or c or g or t
tnggacttgatcctgggtctccaggatcacaccctgggctgaaggcggcactaaaccactgagccacccgggctgcccagcctatagatttttaaaaacctaattggtttggactagttaaattttctcccaatctacaataaataaagtggtagccattaaaatatgacagaaatttttttaaaggctcacctatataccaatgaaaattcccattccacccttcaaaaaaaagagcattatctcattttgtccctgccaaaaatctactcccaccctcagttcaccgacaaggaaatgggcccccagaatgttgtgttgcctgccactgagtaggcaagtggtttcctttcttggattctatttccacctcatcagctgagtgtgagggctccatggaatcacactcataaactccctggccctggcacctggtgagtgctttggaaatatccggaagaattatcatcattaaggacagcagtgaacaacagacgttggaaacagaagtcacgggtctctctttcataacaagttaaaatattgaaaa

SEQ ID NO: 10704 - DNA, 729 bp, Canis familiaris
  misc_feature (1)..(720): n = a or c or g or t
gatgttagaactcancagtatgaaattgagagtacaaaatttcncnncaatanctcanncaggnnnnnntctnnnctctacttaantatagncagagaagggatataacacacccagttcacttatggaaggctttaattttttggaattatatctttttattgagccaaagactgcttgcctgtttcagctatgctttgatccttctaccctctatatctacacaaaaatgtgttattgcagttgtttaaaatgtcaagaataacctgccatctttcctgattatcctccaaatgcataccagtttatgaaaatcctgtttaaaatgcattgccataaatataacactgtattgatgatggtactgtgaggtctggtcccttcatctggagactcataaaagtaatttttaaaaggtgaattgtataattacattatgttgagagctataccataggaattaaatggacccttacccttacctcttcattaattctgcactaatcaaagtcaaagacctgggagtccacataatttaattcaacatcttagactctaggaaagtaactgaaagatacatgtgttaccttatttcatccaaaagtggtttagatatctccgttgtttgaattcatattattaatgaaaagatgttcttctgctaataggtttgcaggaggaaaaatgttcccctggtaggaaataactgtgtgttaaataataacaaaa

SEQ ID NO: 10705 - DNA, 472 bp, Canis familiaris
  misc_feature (1)..(472): n = a or c or g or t
tatttcatcaaaacattttcttttatagcatttaatgtacacaataccagtttttttattattattatttgttttcattatttttgttaaatacaagattcaggatcacatttgtttaaaagagcttctgcatatgtatgtgtgtatntattttatcacaaggcacacaaaataattttaaaagggaaaaaggtgaaagattgagattctgggaatctcaagtatcaaaactttccttcttctataacttccctttattacaaaacacttttctgaaaacttactataggtcccggccatgaaaccatattttgtcagtagttgaccaagctgttttgcgagagctttttcatgcaacagtgcatttaatttccagagtaaatgttgaattccaaaaagaaaaaagaaaagtttaaaggtgagctgccttagagtnnnaacaaaaaaatggcacnnnnannnnggctatatg

SEQ ID NO: 10706 - DNA, 636 bp, Canis familiaris
  misc_feature (1)..(636): n = a or c or g or t
tcagtgctctgttaccagttatggtgtagacaacccagtccgacatgtgttcaggaccctcnctgcccccagccaccccccagccctgccgtatttgatcaccagcaccagggcggnnngtctgtggggcagtgctgcccggctctccggcctggctccagccctggccgagaccccgatggtttgcgcttgtgccctcttgtaccccctgcttcctctgacctcagccgcaccggcccagcaggggcacctgggcagtggtggagggggcaggcctgcgctgccctggaggaggttctgggttgagctgggtcctgcctgctccccaacctccagcagccgccaccccaatgctgcagtgtggctcagctctcgcctgcccaggtctgcagcactctcccagtgcatagggttccgcggggcggctgggctgggtcccggggggcgggcacccccacagctctgagcagccagtggactgcgggcctgtggcctttctgggccagctcttgtatatagctggggcttgggggcaggccccccttcacagagcctgggtctgaggacacttggctgttccctcagcagaaggaggggcaggggtgtgtgctgggctctgaatgatgtacgatatat

SEQ ID NO: 10707 - DNA, 635 bp, Canis familiaris
  misc_feature (1)..(626): n = a or c or g or t
gtagcagtgaaatatggaaaatacagattcactcgattctttaatnnnnnacagcaatgccatnnnannnnnaactatcaggggaaaaaaaaatcagagactagaagtnntaatgcaaaattacaaaagatatagaaatagtacagaagaaaataatacagaagaaaaagtagaaagagtnnnaagggtacatttgaagaagttagggtattatttgaaatgatgaataatttataatgtgggcatcatgaaagaattgtcataaggagtaattatggacttgaggacatcaagaaggtggaactcaaacttccacaagcagaaatagaaagaaaaatgagggggtagcaaaaaatgaagacaggcagcaaaacagtttttgcttatggttatttttccatggtagctgttactgacatgcattatgtaaaaatgaatggaatttgattgaaaagaaaattttcagtagaccagtaatatataaagatagtcttttaggtaaataatgtaatttagaatgtttttcctagaatgcctttttgtaccttgccatagaaaagtcttttcagtgaggaagctgtaaggaataatatgnnnnnnnttagtgatgcattttnnnaattaaaaaaaaaaaa

SEQ ID NO: 10708 - DNA, 600 bp, Canis familiaris
  misc_feature (1)..(600): n = a or c or g or t
aacgaagagtgccangggtnnagtggggattccaccccagtagtcntnnnaggctgcctttggcctgtatgaccaggccagctctctgggtcccagaggcctgcttgcagggtcccagaggccagctcttgggccccttctggtgggcctggccagccagttccaagctgcccaggaaggcagcagggggggcaggctgtccgaggagatcctctgccccactcccacccctgctcttacaaatctctttgatcctccttccaggccaaagtgtgccgccaactccctgcccccagtctttgcccgcctgacacctgctggctagcgaggttcatggggggacctgggggggctcggtggcagggagcgagcggccctggggagtcgaggggccaggaatgcgcgcccgcccnnnnnnnnnntccttcctaggatgcataacctacctttcttttttttttaattttttctcccaatagagtagctctttgtacataaaaaatacttgaaaaattaattgtatgatgtatgagaggacagagtcccctagttttgtatctcgtgtatgactgccatgagttccaccagaaagccgctcta

SEQ ID NO: 10709 - DNA, 685 bp, Canis familiaris
  misc_feature (1)..(685): n = a or c or g or t
catngnaattggtgtctccnntgaaggaagatcgagagccggtgaatgagaacannnncanaggcactnnaatagggacattcacccccanntaaagcagaacaaatccacaacaaataaaaggactcaaacaaaggaactctccatctagaagcacaaatgcctgacatcagagagaccaattttaaataccctaacttctaccccatcttgcatcccatgaactttgattcctaaggaaaaaatggggcattacaggaaatcagaggggcggtgactaatcactttaccacctcccttaggtaggaaacagtacatggctacaagaatctcctaaaaatcctgttcacaaacctgtccaacatccaccaggtgggaatattttcgagcagtggctccattggtggtgaagatggcagttccatttccatatggattgctatttactatcttgatggcttcatccaaagtgtctgtctccagaaccacaagaactggaccaaaaatctcctctttgtaacaggtcatagttggctgtcaggagagatgcatccagaaaagttagtatttgatgcttatctggtactttattacccactgtttatatggacagctttcatgttaggaatctctccatttttaaaccacctttttaaaaaaagtcctttcttgctgtgttccatct

SEQ ID NO: 10710 - DNA, 468 bp, Canis familiaris
  misc_feature (1)..(468): n = a or c or g or t
catccatccatccatccatccatccatccatccatccatcccccaccctgttgtacaacaaatatttagcatgcttgcttgggactgggctctgtgctgggtactggcaatgtacagataagtgaaatgtgtttactggactcagactcttctctctggaagagtctcttctagagtgttcccctggagttgttgtcttacacccattagaaagagggaaaagtccaatggaaggaaatagagcttagagctccatatgaagaccatgaaatctctcagtgcctttgggccccttgtgaaggagggacaaaccataaaagtagactcatcagtggcatctgcagtcaaggggtgctccacgtgnnnnnnctcttcattgtgtgacaaaatggatgctgtgaacttggcattgttcaggacgaatggctagtactttgtgtttacctggaaatgaactgatgaaaatat

SEQ ID NO: 10711 - DNA, 518 bp, Canis familiaris
  misc_feature (1)..(518): n = a or c or g or t
ctctggtttttcttttcagtctttaaacatctgtcctgcttccttacgttttttttcttttnnnnnnttgtccttgtcttnnnnncattgtttaatctggcatgggccaggtgggggcttggagggggtgagcagggtcggcgagcactttggtcagcaggcttcgcttcggagagttaagaagagcttccagcacatagctctgacttcctccagttctcagcactcttgtttgctcttcagtccaaccaagaatctgaatcaaaaagtgtttttcaatacccatgatttctccctgtgttgcagccagccctgataacgcttgttagtacctgtcaccacatcccccaagtgtgctcctccagccaagttcacagacctgtctgaacaagaccctataatgcagggaagttgcatgaacactgcaatggggagagtccagaatagccaggcctaccaagtctcacagtacccttctccnnngaacattccacgtnnnnnnaatgtccacctgtttg

SEQ ID NO: 10712 - DNA, 535 bp, Canis familiaris
  misc_feature (1)..(535): n = a or c or g or t
catatcccctttcccaatttcttttccagaccaacctnctgagaaattgccctgcccaccatcaggcacgtagtagaaaataactaccaatggatgggttatttatgactttcaagggacaacactttccttgccagggtaaggttgtggctgcaggacctgggaaacccaccactaggttctgtttttcctactctatacagcagcacatgtaatcacaaagagacagaaattacagaatcttttcaaaccccatgtactctggcattgggctggcctgtgcattggcaattctcagatcgttttttttcaaagaatcaaatcaaatccaatcaaaagcaggaagcagaatgttggtctgtctgtgtctagagactttcctcagcatgtggcctcaggggacctctttttctttctcctcacatccaaacttggaaatatccaacttggaagtactttacaaactagaactgaaatctgagtcttggcttctaggcttgtgtgccccaccctgatcgtgtttgtcgtcctgcct

SEQ ID NO: 10713 - DNA, 594 bp, Canis familiaris
  misc_feature (1)..(594): n = a or c or g or t
tccacagcncttnnaacagcagtgtnnncctcacatccanggcaggnnacaccttccagagctttgccaaatatggaaaattnnnagatgacctgtactctggctggttggcagaagcccttggcagtaacctgcaggtccaattctggcaaaactctcatggcatcctaccctccaactgctccagggtccagcatgtgctggacgtgacccagatagccttccctgggccagctgggccagccttcagtgccagagaagaccactccaagtggtgtgtagccccagaagggccctgggcctgtgtgggtgacatgaatcggaaccttggagaggagcaccggggtgggggcacattatgtgcccagctgccagctctctggaaggccttccagcctctggtgaaggcctggaagccctgtggggagaacagaacttctctccaggaaatccagcagagcatataagagctaaggctcagacaccatttgggacttcagcttgaaccccagtttaacgtctgtgtgaccctaattatgtgccttaacctgtgactcagtctactcacctgcaaaatgagaatcatgacacctg

SEQ ID NO: 10714 - DNA, 499 bp, Canis familiaris
  misc_feature (1)..(499): n = a or c or g or t
atgtaaaatctgttnnacaggtacgttcctaaaacatcactgagttnnnnnncttggccnnnannngtcctgccagacccagctgaggagaccagacaccatgcannggtcgtggggaaggtgaacgagctgatcgccacaggccagtatggcaggctgtttgctgtggtgcacttcgccagccaccagtggaaggtgacctctgaggacctgattttaatcaacaacgaattagacattgcatgtggagagaggatacggctggagaaggtcctattggttggagctgacaacttcacgttacttggcaagccactccttggaaaggatctcgttcgagtagaagcnncggtcatcgaaaagacagaatcatggccaaaaattaatatgaaatttaagaagaggaaaaactacaggaagacgaaagttatcgtgaacccacagactgtccttcggataaacaccattgagatcgctccatctttgtgctgatcctgaa

SEQ ID NO: 10715 - DNA, 581 bp, Canis familiaris
  misc_feature (1)..(581): n = a or c or g or t
ctttacttctttcaagaggatgatagagtggtatnnanntgaggcacctggaagaagcaaactcaatgacagcttgagagtcaagataaatctcctcccttccagcagttcagcaggttccccaccattctagccctggaagaaagaattcagaatgggcaccatgagattccccagcactggacagcaggaagtgctcccattcatgcaggtcttctctcttacaactgaaatgtcctgacacactacaacaaacaagtataggaagacttttgaaggtagaaagaggaagaaggaagacttcaaacaaattgaggaaaatgccaaacacctcagcgggaggatcgcttgtttgaagaaaaataactgaggatcaagcatatcattatataatagccataatacccaggatccaataaaaaagtatgacatgtcaagtaccaggaagataaaatcctgaataagaaaggagaatcaactgacaccagcactgagatcactcacatgctgtaattattggacaggtagttttaggcaactctcataaaacccatgtggtgtaaaattacaagcactctaca

SEQ ID NO: 10716 - DNA, 598 bp, Canis familiaris
  misc_feature (1)..(598): n = a or c or g or t
atactccatggtgaaagtctaagactaggtnggaaatcgccaagttttagtacaatgaagaatgtggccatgttaccagtccaactcaacagttattcataagctatcgctctgtggccacatgttgccttttgctaagttacctgtttccatggccccagtgagccataaggaggcatggaggaagaagaggcctggccctctgggctttcatcttgctgatccttgcccttcagccattgttttagatgctcagcccccagtcctcacgttataacatgatttggagatttgggcatcgagtgctctttcaatgaaggactggtctcaatggactaagaaagagtcttacacagtatagattacagggcctggaaaagagttagggagccagtaggtgattaatgccagacctatcaatcagagaatcccaaaactatttatttcagcttatttaatttgtagctgatgtcgtctatttgtatgtggcacctggagatttccgtaggatggaactaacttatttatttttaatttaaatatttcatgatgaagtgtttgccttgcatagaatgttttaactgaccggttcaaataa

SEQ ID NO: 10717 - DNA, 560 bp, Canis familiaris
  misc_feature (1)..(560): n = a or c or g or t
ctcaaagacccatatgtctancttccaaaggagatagaaatgtaatatatactgattgctgggtgactggatgggggtacagaagattagcaggcgaaatacaaaatacgctccagaaagctaacgtacccttggtgacaactgaagaatgccagataagatacaaaggacacaaaataaccaataagatgatctgtgcaggctatagagaaggagggaaggatgcctgtaagggagactcaggggggcctttgtcctgcaaacacaatgaggtctggcacttggtgggcatcaccagctggggagaaggctgcggccaaagggaacggccaggagtttataccaatgtggttgagtacctggactggattttgaagaaaactcaagcagtgtgaaagagtccccagaggccatttgacatctgaccctgataaggcataacagattatttctgggtgggaaggttctgatttcactgaagaagaagacacaccatttccctccatgggttatagtactgagacagtaacgcatgggagggggttggtatttgtgagaat

SEQ ID NO: 10718 - DNA, 718 bp, Canis familiaris
  misc_feature (1)..(718): n = a or c or g or t
tcatcagcaaggagaactggaatcctcacancaaggcctgccangncnnnnnngctctcagcgtgctggtgnntagaccagacctggnnnnnccagttcgggtnnagctcgccgacctgctgacgcnggacccagagctgttcaacaaaaggcccaagagttcacnntccagtatggagtggaccggcnctcctaactggttctgacccctctctgttgctgggtcctctgtgtgatggacgacatgtttgacagactgggtgctagagcccctctcgtttgtttcatgttttccttcatgggttgttaatcattagtctgtgtgtgtgtgtggtgtgtggtcccattcccaggttcacctggccacaggtgagcctttcctgctctcttttttaccccagagccagaggagttcacgtttgtgcagtgacaggccagctctccagcactctgtggcctgaaaatctggtctcactaattgctctgtcttacagacacgggtcacctttgggccaggtggcaggaaacaagcccagaaggcaactagaatctccatggggccctggcatcccagggggcagaggggacatggggagtgtgcatgggagaaggatttgtctttacagttgagcaatttgttgagtgattgaagtcagaccgctaataggtgtactgtatgtttaggtttcagtattaaatgtttccttttctactgata

SEQ ID NO: 10719 - DNA, 679 bp, Canis familiaris
  misc_feature (1)..(679): n = a or c or g or t
tccccctgtgtgtccccagctgactgtgtttcactgagtcattggtgaacgtcagagtgagccatccacactnntgcatctggaccccattatgaccaaggcctgtgttgggacatatggttggtcagagttgatggtttgccctgtggtcacgggactgttttttctcctatgggtttagcttggcctcctcagcccaaactgggagccctccataatctcctccctatcagttggggacaaggggcatggcacatgccaaaatgccatactctcacttcagaaaagggacacagcttcataaagccataaacatcagtagtttcaaaaattgtgtaacttgtgcagataataaagtataaagggaagggtgcctgactagaagataggtttgattgaaaaaaagaaccctgtaagcaatcgcattgcaggcgttagctttttcaattaatttacttttattgctagctgataataacaggaaaaggctctagtttacactttgaggatattcggtgaaatattcaacccactgacaatctcatccacccagggagacggtgataaacatgtgaaaacttttcggttgcagctttgcttttccgagaagaagtaaccagtaagtcatctggctgttagattatcttcagtttccctttacttgtctctaggaccttga

SEQ ID NO: 10720 - DNA, 660 bp, Canis familiaris
  misc_feature (1)..(660): n = a or c or g or t
gccctcaaagaaacacttaagtnntagaaatttnactaangctgactttttacaacttcagaaatttttgaggggagcaggtaaaattatttgtcattcaccattactcagaacttcaaataaaatacacattttcaaaacagagcaccttttatatttgataagtgttcattacaaactttagaatgccagtcacagagggttgtctttatgcagcttagcaaacctttatcttactttggaaaagtgattgtgattgcagaaaaggaagtgagaaaatactgccagcagtgattgctactggaggtagttcttaaaactaccatttcccccatgagattatgtggaatttcttttatccttggaaaaagttgagaagatagtaaaagaattaggaattttaaattacagggaaaaatatgtacgtgaaaagcaataaatattttgttcactttgctatcaagatgttcactatcagatatttattatacagcagcaatttatatttttaatcattgcccattaatagacacagtaaaatatttttgaatcagacatttggggtttgtatgtgcattaaaattgtcttttgtactgtaagttactgtttaatttgaatattttatcagaactgtctccctgtgcctttataatataaag

SEQ ID NO: 10721 - DNA, 626 bp, Canis familiaris
  misc_feature (1)..(626): n = a or c or g or t
tccctcgttttnnaatccactntatactcagccttgtgaactccctcagaccagccttgtgtcntcctgggggccctgccgggcccctctcaccttccctccactctggtctgtacctacctgtggaaggccacgttctcaccgggctcttggcccacattccaatcccagccagcttccagcccggtcacactcaccttctcctccctgttctgtccttggtcctctgttgccaccactttggcttttggagctttaacttgagcttctgaaaggtgggcggcatccggccagactgctgtgatggggagggagcccactgcttccctccatttttggtttttgtttcccttggccttctctcttctccctctagaaggggcttctcagactggaactggagaatgcatgttcattccatcatgccgtgttggggctgctgggtgctgacccctggggcctggcctgagcctgtgtgtgctgtccgtgacctcctcaccagcccctccccctgcccttgtccatttaagcttcatgcataattggtgatatgccccctggatgcactaaaatttgctttcatttgcttctggactggccgagaagggaggagatggttatttaaa

SEQ ID NO: 10722 - DNA, 568 bp, Canis familiaris
  misc_feature (1)..(568): n = a or c or g or t
cntcaanatagcatcttgggcagatctggtcaatgctcacgtggtgcnaggctcgggggttgtgcaaggcttgagagaagtaggcctgcctttgcaccgggggtgcctactcattgcagagatgagctctgctggctccttggctacaggcaactatactaaagcagcggttagaatggcagaggagcattctgaatttgtggttggttttatttccggctcccgagtaagcatgaagccagaatttcttcatttgactccaggagttcagttagaagcaggaggggataatcttggccagcagtacaatagcccacaggaagttattggcaaacgaggttctgatatcatcattgtaggccggggcataataacatcatttaatcgtctggaagcagctgagttgtaccgaaaagctgcctgggaagcttatttgagtagactnngtatttgagtgtgttggatacctttttgtgaagaccnnnnnnnnnnattgtctnntgagatnnnnnngcctgaaacagtaagcagnnnnnagtggattggattctttcatgggctctgtgtc

SEQ ID NO: 10723 - DNA, 654 bp, Canis familiaris
  misc_feature (1)..(654): n = a or c or g or t
gggccagtgatgcagatcctgaagttcaagaccatagannnngttattgggagagccaataattccaagtatgggctggctgcagctgtcttcaccaaggacttggacaaagccaattatctgtcccaagcnctccaggctggcactgtgtggatcaactgctatgatgtatttggggcccagtcaccattcggtggctacaagatgtctgggagtggccagagctgggagagtatgggttgcaggcatacacggaagtgaaaactgtcacgatcaaagtgcctcagaagaactcctaaagaactccaccagctccctcactcatccagcgactgaggtcaaggacatcagcagcaaaaccaagaaaaatgacgcttgcacacgaaaagtctcaagagagaaatttgctcatagaatctcttgatcaagaaagtcacagattttgaattggtaaatgggagtgggtgcagggcaaagagtacagggagagccttttaccctgcaacagtactactgctaggtttcaggctgatttttcaaaactagattcaaatgtcttatcttgtccatctggtatccttctgtaacttgcccttgtgggggaacaaaaagctattgtttatccttgtactaacaagttggggcaacaactag

SEQ ID NO: 10724 - DNA, 588 bp, Canis familiaris
  misc_feature (1)..(588): n = a or c or g or t
agctcacaannnagcggcaccagcttgagtnagaactaaaacaggaaagagaaagaaggnnacaaaacaacaggagcatcccaggaaagggttctcagaagccagaacccaaaacggatgnnaagcacaaaattcaagaggaaaatgttaaactaaaaaagcccctggacgaaagccacaggctgccgtctcgccctgtggatggacaggatcagccaccgccctctgaaaagccacagatatgtcagctgtgccaggaagatggcagcctaacaaagaacgtgtgtaagaactgcagaggaaccttctgtaatgcctgctcaacaaatgaactgcctcttccttcaagtatcaagcctgagcgagtttgcaatccctgccacgagcatctgatgaaacaatattcttccagcccatcgtaagaccggaagccaagacctggacaagtgtctctacctgtgttagatgtcaggatctcctagagcccagaactcaagaatcaactccagcgttgataggagtgatttaaatcagccaggtccagggagaaaaggcagtagtagttgggggtgctggaaattttgctct

SEQ ID NO: 10725 - DNA, 469 bp, Canis familiaris
  misc_feature (1)..(469): n = a or c or g or t
gcttctagcaagggtngtgtgccccagcttgggatgtctgagcaagaggtattctctagagnaggnnaacaagttcccacgatgccagtgagtggagaacaccttcgttccatgcacaatggacaagtcctcacatccttcctggaatccctttagagtgcagggcccttgtggggctggtgtccaccctggggacgtttctctgtgactccttgattggagagatccaagatctaggaggaggactctgagtgctatttagaactccttggccaccagagagtcctgtcctgggtgccccaggtctcagacatgattggttcagggctgggggtggtggtggggtgcagtatggagaagtttctgcttagattcgggcactagtttcaattttaatctatttttcagggattgaatcaaactgattccctggggtcttattttagtttatctctcaaagcaaaaacct

SEQ ID NO: 10726 - DNA, 247 bp, Canis familiaris
  misc_feature (1)..(247): n = a or c or g or t
gtgtgagccctnnnggggtgtgctcagggttgtgagtgtgtcgcctgtntgtgtntgnnnnnnntnnnnnnaggggtgggcttggaggggacactgggacccttgccttagacttctgactggtagggcttctctctnaggttggccctgcctcctctcccactgctggggtcccacaggccactctcctgcatgtctaagtggaggaggtctgccttcctcccccatcgctccacctctcacccag

SEQ ID NO: 10727 - DNA, 580 bp, Canis familiaris
  misc_feature (1)..(580): n = a or c or g or t
agaaggaatatnnaaggaagaatctgaagaaagttatnnnnaaaaattcaaaggctcctggagagaaatatngaaaaaagacagttattttaaaaaaattgggtcagatttcaatttgaaaaaagaaagttattatgacaaatttagaaggatttatgaagcatggaaagacaacataaataactactccttaatactgaagttcagagaacttatgaatcgcatacacttccgtagaaaaggatgaaatattccaagaggtctggaggtgacccacccagaaaagagcaaaatacattttcattgagttgaaatggaaatttctccaaataattgaagttgcactctaacggtatttaaatatttaagagatgattgttttaaatgtaatatcagaataatttaagcaaactgtgcttactatgccttgggaaaaacgacatactctataatgttaccaggataaaggttgtattcctgtagtgttaatatttgaagagagagtttaactattggatactgttactttagttatttggggcagccaaatttaatttttgttgaaagagaatatctgttt

SEQ ID NO: 10728 - DNA, 665 bp, Canis familiaris
  misc_feature (1)..(665): n = a or c or g or t
gaaaaagcaaatgatgaaactggagattgaaggaatttnctagaaaccattatnnagttnatnnctctagnancaatngtagtcaaatgggacatttgctttgcactcactaatgaaaataatatttgggattttaangcacaactggaatagctaantacagtctattaaaactgtgaatgtatgtagcaattctgcgtgtgaaggcaaataaactctttaacaagaaattatattcctggccaaaatatgctatatttgtatacaaagacatcataaccgttccagtgtgaacaccaagactgttcgttctagttccattgagaaaaaatgttttccctacctgaaaacagtttcttaggacggaaatggattgtattgtcaaagtagtatttattggagagaaacctaatctacgcattttgcttatacatgattgccagagcctctgggttatagatgattttggtggcatgcctgctgagccataattaccagggacaatgtaagtggagagatgccccgagtccccggggtccttggagagccatcgaatacaaggagaacaggcaactggactgaagctccccggctgaagacacacgttggggtgacacagacgatgtaaaagcaaccaatctgaagcgacacactgtaaatagttt

SEQ ID NO: 10729 - DNA, 355 bp, Canis familiaris
  misc_feature (1)..(355): n = a or c or g or t
acagtcccanncagctgtgccagctccagacatcctgncttcatcccagtgactagggtnnaggacagttgactccacntgcacttacactccctcggccaaaacaaagtcgtggtacccctggtgccagggagcctagggagacagccttgttctgggaggctatgtgtcccactaaaatacaggagttgtatatctgaggaaaaagggagaactgatactgaggccctgggaggattgtgtagggaggagaccatgcccatgactggcctttccaaacccctgaggtctcagagggagggcaggaggtgagcttggagatttaaataggactagactcgggggatccccgggt

SEQ ID NO: 10730 - DNA, 603 bp, Canis familiaris
  misc_feature (1)..(603): n = a or c or g or t
tatttcccagagaannaactacttcctgccttgagggctagannaagacttcctgaagctgcctgccttcagctcacaggaccctggggcctgtcagggcactgtctgggactaggagggcaggaggggcggggtggcctccagccgtcacacacagaaggtgtataaaaaggaaggccttcaatcagaagcagagccaatgttttaaatcacttggtgccttaaagagccacattccaaaatgcgggccaggtggttggagaaaaccacatgcaagataaatcccaaggacttactagcatctcagttcttgcttgcagatgcctggacttgggtgtgaggcctgaggttggaggacccttgctgacaggaaagggaaaattcagttctgcttacgagtggcaggctgtgcacctcaggtttgcagggcaggtgggtcagcttcaagttgtggccaaagggaagctgagcagcttctgtccgtgagcagaagatcagcaaagagcctcaggctgaagaaagggtacgtggaggaagaatatatacacaggtcagtgtaggttaagacttgttctcttgtagnnntaaaagaaaaatttaagc

SEQ ID NO: 10731 - DNA, 625 bp, Canis familiaris
  misc_feature (1)..(625): n = a or c or g or t
ggngtcagaccccctttantngtaaaggggcaagggctgagatgtggtccccaaggggncnnagatccccaaaatggtcaagggtngnnnnnnaatgtgggttatcgttttccttnnngcctctcccntnnnnngccagccaaaaccctatactcagtctcccaatcccaaagccagaggagctatgggagctttgtgttctttatgaaagcccaaaacaaggggtgttgcagagaagggagagttcagggcaaacacaaggactggacttagctccctaggtgccacggtcagttgccggacacggatttatatataaatatatatataaatatatatatatatacccactcatcacggccatctttgttgtaaccatttctgtgtttataaatgcattatctcagaattttcatatttgatgttttatttttttttgtcctttttgtttttctccaccctgtcttctggccaacannnnnntttatttccttttgtccttatttttaaatcatggcagatttcagagaaaagagaaaatgaaaaaaaaaatcaggaaannnnnntgttataaagcaatttaaaatgaagaaaaaaaaacttatgtacaaaccaaggggtgttt

SEQ ID NO: 10732 - DNA, 479 bp, Canis familiaris
  misc_feature (1)..(479): n = a or c or g or t
aatccacccnnngnnnnngtaccagttgctttnggctaagaaagtgcaattaattgatgnnnnnaaagaatngcaggttcatgagggaaatacagactttctgataccggaatatcgctgtattctagaagaagcagatcanntacaggaagaatacaaaaagcaacctgcacatcttgaaagactgtacggcatgatcactgatcttttcatagataagttcaagttcaaaggcaccaatgtaaaaaccagagtgcctcttttactggagattctggacagttacgaccaaaatgcattgattgctttctttgatgctgcatgaaatgtacacaaggtaaagttccaaagaagttgtctttttaaacgaaatattttaaaacagaattacggcacaagctaactgtacatacttgtatttcaaatgctttttaatataatctaaaaacatttaagatgtgacttcctttactaatgct

SEQ ID NO: 10733 - DNA, 671 bp, Canis familiaris
  misc_feature (1)..(671): n = a or c or g or t
gnnntcagacatccaggnnnagcccggnnnggcttgggggcacacagggtacagtgggcgagtctggtggnntcagctttcgttgctgctgccttgggggcccattctgaaaccccaagcctagagctaggctgcctctgtgggctcaggaagcagcgccctcggtgtgcccctggctgggtccctcaagggaaagtcctttcccttggactagagaggggggcgcccctcattgggactgcaggtcgtgggggcataaaggggggcggtgggaggaaaggacctgctgtggactctctcctgctgccgcaggcctgctgctggctccaggcttgccgaggtggagacgcagtgtcaggcgggccgcttgtcgtatttatggaccagacaccgggggagcagcacagacagcttgctctgggcgtagctctccgggccgtctggctgcaccttagaaactatttattccccaagagcagagccctgggcccgtcaggaggtgtcactttggttaccttgaaaagcccccggggcttgcaaccttggaaaatatttttgagactagctgcttgaggtggatgtacaaaggataggcggtattttattgctgtaatattgtacgatactgtaactatacgttgtcacttactgtaaatgtaccatggttttat

SEQ ID NO: 10734 - DNA, 496 bp, Canis familiaris
  misc_feature (1)..(496): n = a or c or g or t
tctgctcatttatcntagctgttatagnctccattttttattgcatctcattaatagnctttttggtttcaacttgattagattttagttcttttatttctccagaaagggattttctggtgtcttctatgtgtttttttttcccccaagttcaacctgcatctttataattgttactctgaactccagttccaatatcttacttatgtccatactgattaggtccctggtcagtactgcctcttgttctcttttctgaggtgagtttttccatcttgccattctgtccagagaatagatgaatgagagaacacaatactaaaatggcaacaacgatcccggggaactatacactaaacaaatcagaagagaccataaaccaaaaaaccaacttttttttaagaaagagaatataatcaggtgagcagaacagagcaatacactggatgctgtattttggtctgttagaaaactagggattgggggatccctgggt

SEQ ID NO: 10735 - DNA, 159 bp, Canis familiaris
cttttagataaaatctgtacccctatatcacttacttcaagactaaagcatattaaataacatgttggggcgataatttaactttagtttcctaatatatatacaaccgtttccatggacaggacatagtctcacttttctcaagggaattgtatctaa

SEQ ID NO: 10736 - DNA, 554 bp, Canis familiaris
  misc_feature (1)..(554): n = a or c or g or t
ctcagcttgcacccnnagaatttcaggtgtcaagtgacggacggttgtnnagcatgaagccgctatctnnacccctcttgaccgtgactctgtttgggagaatatatgagaaggaccagacattaaaggcttcatcagatcccaggtcacaagtaccaggagtaatgctcttagtcataataccaattgtgtgctcattaagttggtagaatattttcatttgttctcttttattttgtgtaatttaaaaaatgatggatgagaaaagaatgaagaccataacagtggtcatggtctcttgtacaagcaaatacaagtatattttcatatatagtttactgttttttagacacacacacacacacacaccccagataatagatgccggataaactgtgacataattttgaaagtaaaatctataaaatgagagtaacagttttacccatattttacaggatttcttggggtgagaattaaataattgaatacatttaaagtccttaggcaagtttctgggtctggtatgtgtgctagctattataactgtgtga

SEQ ID NO: 10737 - DNA, 462 bp, Canis familiaris
  misc_feature (1)..(453): n = a or c or g or t
gatgctgagcggcgccaggacatcgtgctgagtggggctcacattcaggaagagcattgtatcttccggagcgagagaaacaacagtggggacggtgagagctcctgtcgtagcttttccaacagccttttaantctagattattagaaatccccaaggcttgctgttccctgtctctttcagtgatgctttctcatacaatctaatatttgaaaatggagaaacctggcctgcttaaaatgcagggacagacatagctattttacatgaaaatagcctggacaaaaggagctcttttgtggctgccaagaaccaaccaggacaacataggcaattaggcttggtcttgaatgttaattatttactagacaagaaaggaacaaataccctgagtagtgggagatgtgaaggatctctaatcttaacccacgagagcttatttttatctaaaagggaagaaaa

SEQ ID NO: 10738 - DNA, 584 bp, Canis familiaris
  misc_feature (1)..(584): n = a or c or g or t
ccttcagcaccccctagttgtaaaagctcanncatctgnntggttttaaaatgccacaactaaccctatgatggacttgaatatcctacaaggacccaaggcagtaacattttaatggtactgtgctaggaaaaaaatgccttgagcaggacttaaactatttacactttttacttctaaaaattatatttgcttattgtatgttttctatattcttgcaaatttcattcatattcaggagtttgattcagatacagagttttaagtgggaaatgtaccaaatggaagacaggtttcattaagcaagaattcatttatttaaaaaaaatgtgaatgagttcctttctgtaatataatattgtagcctcttaagatcaattttaatacccaactataaatatatagctattccaggattaagtgagttctagaacttcaaatggaacattagatcgtgatcataacaaagaagtataattcatgtccacttatggttgttttataattgttatctcaaagatttagtcacttaaacccagagtgttctggtctgtgtttctanatattatgtctttccgggagac

SEQ ID NO: 10739 - DNA, 686 bp, Canis familiaris
  misc_feature (1)..(686): n = a or c or g or t
ggcatccagggcattgtagatgcttaccgccaagccctgccccaagttcgnntctatggccccaccaacnncgcacccattatcaaccacgtggccaggttnnnaacccaggctgcatatcagannacggcctcgcaatacttcgtgctgttgctgctgactgatggtgctgtgacagatgtggaggctacacgtgaggctgtggtgcgtgcctcccacctgcccatgtcagtgatcatcgtgggtgtgggtggtgctgacttcgaggccatggagcaactagatgctgacggtggacccctgcggacacgctctggggaggcagctgcccgtgacatagtgcagtttgtgccctaccgccgcttccaaaatgcccctcgggagacactggcacaaactgtgcttgcagaagtacccacacagctggtctcctacttcaaggcccaaggttgggccccattcaagccacttccacccccagcaaagagtcctgcacaggcccctcaggtctaggttccattagaggataggctatggctagtcctcagccttgtgtccccaaggtttccgtaagcgtgagccccttaagcacacattccccagtgctgcactttacattttatacttttatatttgctcctgctgttgttgctcttgattccctcctgcttgccctggagtcattc

SEQ ID NO: 10740 - DNA, 333 bp, Canis familiaris
  misc_feature (1)..(333): n = a or c or g or t
ggggnccatcaggcctagatccccaccnnnnngaannnagagccttctccgcatgtgtgtgtgtnnntgtgtctgtattnntatgtatgtcgctcttnnnnnagcaacnnagttcatggggcanctggactttgcatgttagagtgagcccccaagccccttnnnnnnnacccctctccccagggccctgcccatctctcctgcccccttgtcagccagcctcgctgttccctgcagagaaaagaattgtgggaaactccaggactcttcccacccatcccccagcgcctgcctgctggggctgcctgcatgcctcnnnnngagcccaggggt

SEQ ID NO: 10741 - DNA, 199 bp, Canis familiaris
  misc_feature (1)..(199): n = a or c or g or t
ttaannnattttacaccggggaatgtgaaaagttccannatatttatattgaagannnnnnannagtataaaactcaattgcaagagcaggtctgtgcctttggagtctgatcatgtccttggtcatgactatttgaattctaattgtttgatgaagaacttcctttgaacttctttttatttaaataagtgaaaagag

SEQ ID NO: 10742 - DNA, 663 bp, Canis familiaris
  misc_feature (1)..(663): n = a or c or g or t
cacagctctgatgctgtggttcccacgcagccacaggcaggcccaacgctcctggtgccagcacacttctgtctctggccccgcgaggctccacgggctgccttctctgcagcccgctctctcgtttggagggcgcgnnnngnntagcttccttgccctttcttccntcgcttctccctgctgctcccgacggcagccnggcagcacagtngaagagtccctgccttggcctggcttcctgacctgcccagtttccacgttggttcagggctggaaacctctcctcttctgtgtcggcgttctggggcatcgggccggtcggggaggacgtacccctgctgggttggtggctgcaggagccccgaccagtccccatcacgtgcggctgtgcatgcagaggcggccacaccacagagggacgtcccggggagccagcggtctcactggagtccccggaggtgctgacggggactgctctagtggccgcggccccgctgcctgggaccctgccgagcaccccgggctctctgacccgccgtctctgagtcatcagctgtggggcagaggctgtagagggtggtcgcggctccctagttgacggttcatcttggtttcagacaatcccagtgacacgtccctcccaacaagaacagaaaggggacc

SEQ ID NO: 10743 - DNA, 639 bp, Canis familiaris
  misc_feature (1)..(639): n = a or c or g or t
aagaaaagcagggcaagtccaatgatgagggannaccacaagatgagggcaagccagaatcccaggcaaagcctgagggtgagccacgggctgctgaaaagcgcccagctgaagattacgttcccaggaaagcaaaaagaaaaacagacagggggacggatgattcccccaaggactatcaggaggacttacaggaaaggcacttgggcagtgaggagatgatgagagaatgtggagatatttcaagggctcaggaagagttaaggaaaaaacagaaaatgggtggttttcattggatgccaagagatgtacaggatccgtttgccccaaggggacaacgaggtgtcaggggggtgaggggcggagggaggggccagaaggacttagaagatgttccatatgtttaatgcctttggcctttaattctgatttctctgatgggaatattgccaactcgctttccctggcaggcatttgccaggctatgtgctttaaccttatgctgatacattgctttaggtgtcactctcagttaccagcagccttttgacccaactttgacactctgtctttcagtagggaactttcacccatgtgcatggaagaaatgttcatggtacattgtaaaaatattaataa

SEQ ID NO: 10744 - DNA, 706 bp, Canis familiaris
  misc_feature (1)..(706): n = a or c or g or t
aagctgcagaagaaagacgcangtcccatgaagctgannttttgnngcagctgnctgagnngcgnnagcacgagaaagaggtgcttcagaaagcgatagaggagaacaacaacttcagtaagatggnnnaagaaaagctgacccacaaaatnnnggccaacaaagagaaccgagaggcccagatggctgccaaactggagcgcttgcgggagaaggacaagcacattgaggaagtgcgaaagaacaaagaatccaaagatcctgctgatgaaactgaagccgactaaatttgttctgagaactgactttctccccttccccttcccaaatatccaaatactgtactggccagtgtcattttatttttgccctcctgacaaatcttctagaagctgatgtaggactgtataggtagatccagactgtatgatgttgttttcggggctaaaggggagaaattgaaaagtgttgtactctttttctaaagtgttgaagtctttctaacgtagctactttttcttgttgcatcttttctacttcatgcacccggggtgctgggttaatggctagtactgtattggctctgtgaaaacatgtttgnaaaagagtatgtagtggcttcttccaaactgttagatgctgaatatctgttcacttttaaatcccaattctgtcccgatcttaccagatgctactgtacttgaat

SEQ ID NO: 10745 - DNA, 360 bp, Canis familiaris
  misc_feature (1)..(360): n = a or c or g or t
tattccctctctttgaagagnnnnnangnctttatgcacatgaaactggccaaaaccaaagnnnagtatnnnnnnggtcagaanagccccccgtnnnnnantgtcccagaagtcatccantactataccaccagaaagnngcccatcaaangagnnnngnnnnngtccctccnntacccggtggctgnnnggacccnnngaatgaaccagccccnnnctgctctgtgacagggcccagacttggagggcgcccaccagcgccggccactgttgcgtgccgcggccaatttgtcgtgtgtatggtactagnncancnntgcatgtcnnnngaatgctgttgccactcatgggggctgnaga

SEQ ID NO: 10746 - DNA, 569 bp, Canis familiaris
  misc_feature (1)..(569): n = a or c or g or t
gagaatattttatccttgattgtgctatgtttgagtnnaagaaattctttgaagtagatgtgtgaaaaactgcatgcctttagaagcccattattagaacttgctacttcaggtgctggggacttaatgaaaaacatgataaattcatttctctggcccaggtaaattatttctggtttcacttataattactcctggctgggtcaaaatgttgctctatatatttgcttacttttgactttcccaagggagacagtttaaagactctgctaactaccatggaaagtaaatgaaagccaatgactgannnnccattttgttattcccatgacattcacttgcatcacttgcctagggctggaatttcggacttcattcaggagaacttgaggtgctgccattttgttgtattatgtacaggttggtgggctgggaagcctttgtcacaaatctatagtacctatttcaactgccctctaaattactccttccctgggtttgttttccttgtgggaggggagtggattgtatgatgagtaagaagtattaattttttaaaagacaaattg

SEQ ID NO: 10747 - DNA, 690 bp, Canis familiaris
  misc_feature (1)..(690): n = a or c or g or t
agagatcntcacagaatngnnaatatnntatttcctacnnagacggcttctaggtgtacgcacagaaggcgacaaaaaagcagcaaaggtgcaaaagctctctaaaaatgaagtgcttatggtgaacattggttccctgtcaacaggaggaagagttagtgcagtcaaggctgatttgggtaaaatagttctcactaatcctgtgtgcacagaagtgggagaaaaaattgcccttagccgaagagttgagaaacactggcgtttaattggttggggtcaaataagaagaggagtaactattaagccaacagttgaagatgactgaagaatattatttacataatacgtctggatgaagttatagtttctgttaacaacctgggggtataatttcaaagcaatactggggaatatatttcatagttcattaccttagtagaagttgtaaggttattctcatctccttgttatgaagatttaacttcaaaataatagaatctataatagttgtcaaatgggcatattaatgggttcaatcgaacactttagcagaaactgattattgctaaatggtgtcaaatttatacatcacttcatgtttgaaatgacacacctgttaaaaccagcctttgctaaggccatatatgtaccacactcaacctgtttcaaataaagttttccttnnnnnnn

SEQ ID NO: 10748 - DNA, 552 bp, Canis familiaris
  misc_feature (1)..(552): n = a or c or g or t
ccatgnnaactgtcccaagccgggatctcagaatnagaccaaaanaagacaatggtggtaacatgatannntttattagaagactttnnnnnggggggtggatgggggaggggaaggaattgtagcagaaacagatgtatttttcttgtgatttttattttgaatcaaatattgtaaattgtgtataaatgaagacgctgaatagctctgtttccacttggcgtttcaagtctgatatcaggtgtctgtacagggttttgatctcactcccttgtataactatacagcaatnnnanagtataacatatggaatcatttcgagtagacttgtgtgttgctataagctttcagcaggtcctctgtctttgtagaataagcatgtcgtttattttcagataatcagaaataagtgtgctganannnnnnggnnnnnnnttgattctggctacttanctttcttttctctctgatgtttgaatcgaaggatgnagccaatgaaatatgttcagttggttttccttggtttnnnagattaaaaacaagacaaaacaa

SEQ ID NO: 10749 - DNA, 106 bp, Canis familiaris
  misc_feature (1)..(106): n = a or c or g or t
cggccctgccatctccatggcctcccccatgtccatcccnnncnnnaccatgcactatggnnnnnaggccccgccggcgtggaacagactgacagcaccaggaaac

SEQ ID NO: 10750 - DNA, 603 bp, Canis familiaris
  misc_feature (1)..(603): n = a or c or g or t
cttcacccggcttttcctgaaagatgacttgctgcggggcatggacagcttcttctcagcccccatnnacttccgaggcctccccagaaactaccaccaagaagagaaccaggggcaccggctggggaacaacactctctctagccacctacagatcgacaaggtgacagacaacaaaacaggagaggtgctgatctccaagcaggtggtggcatccattgagccgggagaggggagtttggagggtgactggaaggtacccaagatagaggagaaggaagccctggtgcctgtcccgaaagccatcgacagcttccacccagaaccccatccccgagtggccttctggataatgaagctgccacggcggaggtcccaccaggacattcaggagggtggccgctggctcagcgagaagcgacaccgcctgcaggccatccgggatgggctccgggaggggagtcacgaggacagccttgaagaggggacccaggggtcctcccactccaagctgccagcccgcaagacccacttcctgtacatcctcaggccctctcagcannnntagggtgggggctagnnnacacctgcatgtacccccca

SEQ ID NO: 10751 - DNA, 383 bp, Canis familiaris
  misc_feature (1)..(383): n = a or c or g or t
ttcagggactttaaatcagtnnntttttactcttcgnnggnncnnggtacacagtaacttggnnnnnngccaaacacactaattaaagggctaannngaaaatgatgcttttcttctgtattcttattctgtataaataaagcagttgcnnntttcagaagctaaccccattgcttgttgttggggccctttctgtgcnngggcaccacatgttagccatggttgtaagctgtcttnnnnnnnntntggcccgaaggaggtttctggctggtagatgtggtgttaatttcccannnnacaaatatggaatccatttttcagaaatgttgccctttgaatgggatgattttcttcatctcannnntaaannnnctaactttaga

SEQ ID NO: 10752 - DNA, 349 bp, Canis familiaris
  misc_feature (1)..(349): n = a or c or g or t
aagcattccccacacccactcaccacctgccaccagnngcctcccactccgtgtcctctgcnncctgaactcagtagtccacatgcaccaggctgtttcttgcctctgtgnnttcggtgtgctgttccctcacctagaatacctttagtttttctacagctgggtaacccccagctcaagcaccatccgaagccccaggctggtcaggtgccctggggactactccctccatgttttagtttaacccacagaactgtaatcagccgaaagctggttggtctcgcctagactgtaagccacttgagggcagggactgtgtctcgtccatctctgtgttcctgctgcagag

SEQ ID NO: 10753 - DNA, 662 bp, Canis familiaris
  misc_feature (1)..(662): n = a or c or g or t
gnnctattccatacgcacgatagactataggtacactgtgtnggttggcttcagtccccatgaatttctggctaannnnnnngacgtgcatgcaggggnnctgtattttgttgattctgacnnncngcangaccacaacatgtataatgactnnnagggcaaagacctcctccgagcatttgatgccatttttctcgccaaccactgaggagggcatatataatgtactcccttccagccggggagagcaagagttagaggtggttatttggtgattacccataatattggaagcaacccgagggctaggcaatcaaagcatgtgtcaacagtttggcctaagaatatgtaatagcccaacctcttgattttttatttatttgagtctttattaatttctgcttggtaatcaaactgaccatggctatgctgaaccattctttccttttttggacaatcacagtttatttactgagtggataaatgtaaagtgagcaaatgaaaattgtcatgcttttagccatcaggaccataataaccaaacacaataccatactcaagaaatgctgtaattatctctggaatttagtgcattgttcaaagttatcgtatgtcaccttagatgtaacactaagtccctggttcttttgttcataatttaa

SEQ ID NO: 10754 - DNA, 634 bp, Canis familiaris
  misc_feature (1)..(634): n = a or c or g or t
agaggatgcagatacacanngcaaggtgcaccagctctatgaaaccatacagcgctnnagccccatcgcctccaccctgcctgagctggtgcagagacttgtcaccatcaagcagctgcatgagcaagccatgcagttcggtcagctcctgacacacttggataccacacagcagatgattgctagctccctcaaggacaacaccgccctcctgacccaggtgcagacaaccatgcgtgagaacctgtccacaattgaggggaattttgccaacattgatgagcggatgaagcagctgggaaagtgagcacctttaggagatggagaacaggggtaatccctgcccctttgaactctgttaacagcttacatagggctcccccttcattataactctcgcacccccatcccatttgacactggggtcaaggggttcttcttgcatgtggggtttacacccctcctccgacgaatacagagtggtagctgggggactttagatggtggtctcccctcaggccctggggacgtgggcccagccacagggcagctcctgtccagtactgctttgcctggggtggggaaggactgggtcctgtcctccagcacagctcctgtggctggatgtactact

SEQ ID NO: 10755 - DNA, 253 bp, Canis familiaris
  misc_feature (1)..(253): n = a or c or g or t
gcagtgttnnagagttgnnatacacatttaaacttttttttttttttttttctggnnnaagttcccaagagagtgtaaaggttttaccagaaagcaaaataccatgcagctttacggaagtttaaagcatgtttgcaaatattgcagccccatggaagaatttgcatgtacagggaagttgtggatggaggtggtttgtggaattttaagtgctcattnnnntaaacctttgctttgtagatttgaagggaca

SEQ ID NO: 10756 - DNA, 575 bp, Canis familiaris
  misc_feature (1)..(575): n = a or c or g or t
caataaaagtnnngctccgaaacggnntcgggnnncttggtgagtcgggtcaagaacagggtcgtggcgggagcgctccgcccggggcccagaggggacagcggccctgtcacgtgcctgggtcagggcggcgggtggctccccttccccggggagggtgccgggcccgcccgtcgtgctcccctgccctccaggtgagtgtcctttgtgacatcttcaggctggaaacccttccctccctgaaacggtagggccagttttctgagcgtcagatacaaccagtgaccgagtgcatcccgagggggacgcgtcctggccgcggggcgccctccgggaaggggcagcaccctgggaggtggtttccccggagaacgggaccgtgtgtcaagctacgtgaggggcggtttaccctgaaacctatacacgttgtcttcagatgctcagagcgactgcatggccaaccgttgtccccgggttccggggggtgggcctgtggccccgagtcccacgtgcaccccgaggccaggccggaggcttaggatggttccgtgctgatgtccatcgcgtatgtctga

SEQ ID NO: 10757 - DNA, 604 bp, Canis familiaris
  misc_feature (1)..(604): n = a or c or g or t
acaactgggcctacaacaccatgctgaccaagacatggcgnnctagtgccacgggggatgagaagtttgctgatcggctgctcagggatttcacggacttctgcatcaaccgcgacaaccggctggtcacgttctggatgagctgcctggagaagatgcatgccagtgccccgtgaggccgggctgcacctgggtctgacgcacagggaggattccgctgtcactctccacgtccaataagagcagtcaggctttggggggcaggcggcagtgccaccatcggtgagtgggggccattgctgctgcttctttcccccatccccccaaatgtccttccccttgaagagaaagattcaggaagaaactggcgctgagaacaggtgggaggcccacatggtccgtggaaagacctcagtcctgaggaaaggggtgagcagcccccatgaatgtccttggagagggggtggctcctgcgagcattctttccctccaccagctgtaggcatttcggagcagtctgacacttcccgcccaaaagtgtgcacaggatgtaagataattttgtgaaatagtgtaccataggctcatacctactgtatatacc

SEQ ID NO: 10758 - DNA, 544 bp, Canis familiaris
  misc_feature (1)..(544): n = a or c or g or t
tccactcgctgnncgcaattggttcccagctgtctccagaacagggcagctcaggcattgagatgctggagaccgacacgttcaaactgcactgcttccagacactgacagggatcaagtttgtggtgctggcagatcctaggcaagcgggaatagattctcttctccgaaagatttatgagatctactcagactttgcccttaagaatccattctactccctggaaatgcccatcaggtgtgagctgtttgaccagaacctaaagttagccctggaggtggcagagaaggctggaacttttggacctggatcataggctgagcctgcaatggatcccccacattttgagagatccttcagcaggtatcctgctgtttccactccgatggagatcgatggaggctgtgggcagcctcgttagtgcccttggagatgggagggtgctgagcctgatgacgtgtactgatccctgagccttaatacatgctctgccctcctgtatctcttgtgggcctacttcccnactctgtacaggtttattta

SEQ ID NO: 10759 - DNA, 588 bp, Canis familiaris
  misc_feature (1)..(588): n = a or c or g or t
agtccatgaagctagctgtgagaggtnngcctgagtgatggctttgatacattgtcacctagggcatctcagaagcaacnnactctcccaccactttcccttccctctaccccaccattccttttacgatgctgtgaagagagttccctttcttagatgaatgggcactatctattttgttcgttaatgggcaattttagaatgaactgggaggatatcttttcttcctttagaacttctttggatgtgtacactcggactgaagggagtcttatgtttagtttcaaaatgcattctctcttctggatttctttcttgactttttaactttgggtccattttttttttttttcattgcctcctgttccaggcagctctattcttacagagccatggcaggacattttaaaattcgaatagaaaacactaaatggaaagttctatagaatcactagtgactaactactgggaacctattttctcaatcttcctccatgttgtgttctttgtattctcaagatgataatatattatgtatttgaattgctgaaattaaaaatgaaatttaaaatatatgtatataaagcg

SEQ ID NO: 10760 - DNA, 453 bp, Canis familiaris
  misc_feature (1)..(453): n = a or c or g or t
tgccatnntcagaagacccaggcgtcctgggaatcgtgtatgactcagtngcttttcctgagcaggatgnnagcccccctggcctccgagtgaccgtgatgctgggagggtcctggttacagacgctggaagccaggggtggtctcttatctcgnnagctgttccagcagcaggcacagcaagcagctgccacccagttaggactaaaagagccaccaagtcactgcttggtccacctacacaagaactgcatcccccagtatacactaggccactggcaaaaactggaggcagccacccagttcctggcttctcagaggttgcccttgactctggccggagcctcctatgagggcgttgctgtcaacgactgtatagagagtggacggcgggcagcggctcgggtcctgggctcagnncctaacagctgatnnnnnnctcccacctcctcct

SEQ ID NO: 10761 - DNA, 583 bp, Canis familiaris
  misc_feature (1)..(583): n = a or c or g or t
cannagctcctccaccaggtgctacaattgtacagtatgcagcacaatcagctgatggcacacagcagttctttgtcccannnagccaggttgttgttcaagatgaggaaactgaacttgccccaagtcacatggctgccgccactggtgacatgccaacttaccagatccgagctcctactactgcattgccacagggagtagtgatggctgcctcgccaggaagtttgcacagtccccagcaactagctgaagaagcaacacgcaaacgagagctgaggctaatgaaaaacagggaagctgctaaagaatgtcgacgtcgaaagaaagaatatgtaaaatgtctggagagtcgagttgcagtgctggaagttcagaacaagaagctcatagaggaactcgaaactttgaaagacatttgctctcctaaaacagattagtagaaatatttaactatgaactgattacaacatgtacagttgcttctgaaggcaatacaatattnnngccagcaagaattatggcttttttcctttgtatcattcaccgtattctctaacctctgacattcctaaaatgcctc

SEQ ID NO: 10762 - DNA, 506 bp, Canis familiaris
  misc_feature (1)..(506): n = a or c or g or t
gaactctgggtggaaaggctggtcctgtggctcggtcgcgggcatgttccgcagccagagagcaaaatcccagcgctctgtggttcgaagaagagcactgcgtcggtcagggttgtgttcaccctcgtagccgcgggagagnnnnnnnnaacagtgccctctgacccccaggagcgttccccagaccaaacggtattgaagaagccatcacagccgccctctgggctcgatgtccccgcgacatcccggtcacggcgccataaataaccgctggtcactcacccagagcagggtggccggtccttgcaaagctgacgtgaaagcctccaggatcccacctggtctgacagggacaagaaggaatggggaagcaagattttcaatcccgagggtgaatttcctaggtagacgtcactaataatttctgctgtcttcataatttctttctctcacaggagactaggagaaagagtcttttttttttttttaaataatgaatcttttta

SEQ ID NO: 10763 - DNA, 568 bp, Canis familiaris
  misc_feature (1)..(568): n = a or c or g or t
ggatcgagtatgtcatgcgccaccaannagncaagcacctgcggnnagcctcccatgacctcacctggttccagtaccactccntggatgtgattgggtttctgctggcctgtgtggcaactgctatatttgtcaccacacaatgttgtctgttttgttgtcnnaaggtcgcaaaaactgggaagaagataaaaaaggagtagtcgtatctgaggcctccagctggtctgcctcctagacgggctcctccggtttctgccagcaaggagttatgatgcaaagttcccctccctgtgaagaaacaactcctcaacttagcttctgagatcaacatctgctctcaagggatttattgcctgtttaagagtcagaaatatgtcatgccaagagaaaaactggcaaattaaaattaaatttaaataaaactctacgggaatttacagaaacttcttattctaaatgaaaagtcatccccctccagaaattactgagcttacctgtgtttccaacattgggcatgaatataagaacattaagtaggctattcacaatatcactgttactgtgc

SEQ ID NO: 10764 - DNA, 494 bp, Canis familiaris
  misc_feature (1)..(494): n = a or c or g or t
aggaagcagtgcccaggctnnnnngggtggggaggggggttggccagccctggcacccccagcagtttggtcccagtgagagcagggccagcagctgggtcaggcccagggatgccagggggctgcccacgcacgcgtgcgcccaccccacctgctgcagcccttccctggttactgaggtgctggcccaggggctgtgggccccacctggctgcgtggcagccgctcccagggcctccacagcccacagggagcccttgtccactgggatggcagctgggcttttgcaggtgggagnnncctgtgcatgacccgggccagggtggctcccataggaacccaggcaggacctggtgccacgaggaccctctgagcgggtgctgcagagcagggagcacggcctgaggagtagacctgcccccttctcagtggaggtccccgacagccctagtttgggggtgcggtcacttatacataccaaagttaggttttaa

SEQ ID NO: 10765 - DNA, 587 bp, Canis familiaris
  misc_feature (1)..(578): n = a or c or g or t
cacttcaccagtgccnntcnnnnncacaccccgccccacagacccaatgcccacctcngaggtcaactaaggcaggccccacagagatcaggaccagtacttcctaccaggctgtccccagccacccttcgggctgtccccagggcacaaacttttcaggcccagcctgagctgctgtggctgccacttggatggagacctgaaaaagagaagttttatagcctgaaacccataatcaggctgggggaccttcttcctctgctctccattcctgggggctctaacctgagaaacaccctcaggtatatcacctgcaacttggcagccctggagaggtatctgtgagccaaccctacagtgcccatcctcgtgctcctcctgcctgtggtcaggcattaagagccaagccaaccactctgcactttgtgtccctctcccatctccactctcatcagcgctgggccatctcctccagttcttcctcttttattgattagttagtttggaaagttgattggcaccatggagggttggcaggtggggctggacagagggactacgcacaggaacatgtacatatggaaaaa

SEQ ID NO: 10766 - DNA, 632 bp, Canis familiaris
  misc_feature (1)..(632): n = a or c or g or t
ggtganctgctgnagcngcangctgtaaaggcaaagacaatgttgcnnnnctttnnaatnnacagatagattttgangagctgctaaatatcaatgtgtaaattcataaatttatatttagaaattagntcttgttaaacaaccagctctggctgagctaaatatgtagcttatgggtagtatgttacattttaattttcctctttcaagaaaacgtggctattttgcccagatactgcatatttttaaccataaagaagtaactttttcttttttattacaagtggtacatgtttttgcagtaaatgctttacagaactagttttacagccctcttttgttctaacgccttgttacctgaaacttgtgagattttaaaataagcatttctaaaatttttattcccagaaaagaacagcaagttaattaaatcaaatataaaaagaagtattacctctacatgagcatatttctcttaaaaatattttttaaattttgtatatggaagatctctcattttactatttctttatttatgcccaaagtaattgtttttactgctcatgagagaaaaccataagccctatattgtttcctcatagagtaaatttntggttcattagtctcttttt

SEQ ID NO: 10767 - DNA, 532 bp, Canis familiaris
gcagcagttcaaggaggagaagacaggcaccattctgaggaacaactggggcagcccccgccgggagggccccgatgcacaccccatcctggctgcagatgggcaccctgagccaggctccgatgggcatcccatgtcaagcaccgcctagctcgctgtgtcccctccaccctttcctcggacatggctccttgggatgaagatggtagagtgggttgctggtgtcccatcaggatgaggcataggtgtctccctgcacccttacaaggagcgccccccaacacttacccttagaacactgagatgagggcagtatatcaggaaggggctgtgggacaggggaagggcagcgatgtcctgacgcaaaagtgggagcagggacctcgattcctccctctccatttaccccgtttaactgggccccaaggacttgtccccctgaaagtgccttaagcccagaagggtggggaggaggttgtgttgctgactcaggggctctttcctccctgtttcctgtctcttctgaccttag

SEQ ID NO: 10768 - DNA, 500 bp, Canis familiaris
  misc_feature (1)..(500): n = a or c or g or t
cggtgcatttgtgctgggacatggggaatggccagaaaaaggaaacctccctcgatcttggaggcatctctcnngcgtcggagtgcgctctagcagcatcccagcctgctgagaacatctctaaagacctctacatagaagtatatccagggacctattccgtcactgtgggtacaagtgatttaaccaggactcaggtggtagcagttgactcgggacaaagtgtggacttggtcttccccatatgatgttgaccatcatggctatcacatcaccttttttttttttttttaagtaacaagaagaataaagtcaccgtatgattttcttcatatttacacagtaatcctgctttcagggctgactgtagagggtcagcctttctgggaactggagtttgtgtctttcagtgtctattttaacttaaatgtttaagacccccctcccccttctgctgaaagtaataatgtaatgatgctgtcttaatagttcttaactgc

SEQ ID NO: 10769 - DNA, 518 bp, Canis familiaris
  misc_feature (1)..(518): n = a or c or g or t
cccagggctcccatgctnnnngagccccagctgcccnctgccctgcccatgccaaatggacctcatctgcaccnntgcgggacctgcacggctactggtgcccaagacctggccccggagcttcggaaccctcttgctggcctgccgacctcttatgtgctgggttccatcccaggacctagagggcccgcctgtcctgcattggccccttggccctatgcagaggccccctgcaccccacgatggtgggttgtgactggggaggggatcttggccacagccaaggaaggcctccccggccccgggggaacggagggcaccttggatttcccactttcctaaggatccggaccccgggaccccgggggtaagcggtgcctcagctgccctgccaaccctctgcccctgggctccagcgggtgtttcctgctgaccctccgcgcccccactccgtacggggcggggggtggggatcttcgnnnnnccgcactgatgccgnnnccacagctgcgtccttg

SEQ ID NO: 10770 - DNA, 589 bp, Canis familiaris
  misc_feature (1)..(580): n = a or c or g or t
tgaaagagaaatgcttttagaaaagttcannaatggcgctaaggaaatttgctatgctcttcgagctgaaggctattgggctgactttattgacccatcatctggtttggcattttttggaccatatacaaacaacactctttttgaaacagatgaacgctatcgacatttaggattctctgtggatgatcttggctgctgtaaagtgattcgtcataggctctggggtacccatgtggttgtaggaagtatcttcactaatgcaacaccagacagccatattatgaagaagttaggtggaaaccaacagtaatgtcaatgtattggctgtactattgatatgtaccatttgggttgatctataaacactgtcaaaagcttcaatttttaaaatttacttatttctgggtatttatttcaacatttatgaatttacagcattggcaaatggtataatttttaaatctcaaatgtttattaatactatcattgaatacatgttgatcacatccacatcgtatagaatgtgataattaacatgtaaccaggacatgatctcatattgttatttctcccctttattggaaaa

SEQ ID NO: 10771 - DNA, 619 bp, Canis familiaris
  misc_feature (1)..(619): n = a or c or g or t
gnnngtgatgtatnnnagtgagtgagcacataggaacaggtnnagacggnnnnnctgtctcttctgcatggtttattttccctctgcccctttatttaatgctctctatgtgaaattagtttcaccacattatgtgtgagcatttctttttcctgttaactttatattacagaacctgtcctactgtaacaatacaggaactagctgttttactgcaccagtgttataggcaatttcagtatgttatgaacaaatcaaagaatgtttactctctgcaaactggtaaattaccaaaagcaatccagatgtggcttactctgccacagttaatgtcactcactttgtttgatggggtcactttttagctgtcactaataatggaattaatgggaacacttggtaagtgaaattgtaccattaagtacaataataaagtttttcccaatgtattataaaattgacacaagctagtatcaggtggatttcaggatttctctaaatgtcccagggggctaaaagctaactgtaaattactttaactttcactttcaaatctgacaaatcttgtttatatggtatataaaaccttgttttcatcagatttggggggttttatatt

SEQ ID NO: 10772 - DNA, 631 bp, Canis familiaris
  misc_feature (1)..(631): n = a or c or g or t
gactgaagtcctgatcaagagggaccanncaaagatgggctctgttgccctgcntggctcttgccaagggctgcttcatctcactgtcctagagtaagatgaagtcctatctggaaagccaggctgatgtatccccttcattccccagtttgagtagggaagagatgggcctgactcaagccttcagaatctccccaaagtggagttactgccacatacagcacactgggaagttagaagggtttgcgcatcctgccaggctactcgataaggcatttctggaaagagctctttcaggtggctctgcctcagccacccacctacaccaggctgcctgtttggatctgttcttgcacaaggcttcacacagccagagaagctgcagctgaagagctccagtggcggaagccgggttggtggagagagagggtccttgtcaccaggctttagtgtgtctgggatgctgataggatgagaaagaagagatgtcattacttaattggttactaatcacctcagaggctctgaagaagtggggacagtggcttcttagcctgtaagtgtccagatgacattctttttggttttggccnnngcactgtttcaattacaagttgttctggcatttttc

SEQ ID NO: 10773 - DNA, 620 bp, Canis familiaris
gagccagagctgctggtagcccatgcctatacccgctacatgggggacctctcggggggccaggtgctgaagaaggtggcccagcgggccctgaaactccctagcacgggagaagggacccagttctacctgtttgagaacgtggacaatgcacaacagttcaaacagttgtaccgggccaggatgaatgccttggacttgaacctgaagaccaaggaaaggattgtggaggaggccaacaaggcctttgagtacaacatgcagatatttgatgaactggaccaggctggctccttgttggccagagagatcctggaggacggagtcccagtgcacgatgggaagggagatgtgcgtaaatgcccctactatgctgctaaaccagacagaggtgccctggagggcagcagctgccccttccgaacagccctggctgtgctgagtcagcccagcctgcagttcattctggccgctggtgtggccctggttgccagcctcttggcttggtactacatgtgaaggacccatcataccacgttggcaccctcttcccaagtgaccactggcctgcccctgcctccaccggtgactgaactaccacctcaggtgactgtttttta

SEQ ID NO: 10774 - DNA, 548 bp, Canis familiaris
tatcatttgtggatcgagtttatggtgaatccaagttgggaggaaatgaaatagtctctttcttgaaaggattattgactctctttgctactacataaaagaaagttattcattatacttatcatgttgagttcatttaaacataaaagaagcctgcttgctgatttttataaaatgtactcttagagcataaatcataaggtaaggtaaatttcatacaaatctttttttctgaggaaactccattttatatgtcaaattaaattagaaaaatgagcagtgttttcaattttcatttacattttgctgtattattaagacttgtaaataaatgtattgggtttttcagaaaatactgagctttcattagagtatgtgagtgcagaatttcttacatggtaaagactttgaagtatattaaaaaactggattcatagctcattataatagataccagaagtaagaagaatgttaattatattcatgaaatatatatggctgtttctgtatatatgaagaagtagacacctctgccccttctttaaaaa

SEQ ID NO: 10775 - DNA, 578 bp, Canis familiaris
  misc_feature (1)..(578): n = a or c or g or t
tgcacggcacacacacatgcacgcgtgcacgcatacacatacatatgcagtattnnntaagtctaaaagaatagcactgttttgctgcttttgtctttctagctttggccacttaaagccaggttctatagtgacacacactagtggggcggccttcactgccacctagtggagcgatggtagaaaatgtattctgtttgaacctatctgcacccctcttccgttcctggagcaagtaactgaactcagttcttgagcgatccttccagtcacaccatcctgccctgtagtgctaagctgtccacctgacataccgctggacaattaggaagtgaagtgtgtcggggaaaaaaatgacttgccaatgtccttagataaatcattgaaaatctttaaagcaattttcccacttgtaaaatagggtgtaacaacacctccaaggattgttgtgaggatcaaataaagtaaatatacatgacaagatttataaagtattttgcacacgtatttgatactcttactattgatatctaattttcacctgtcaagattctactgagannnntgttctcacttgt

SEQ ID NO: 10776 - DNA, 659 bp, Canis familiaris
  misc_feature (1)..(659): n = a or c or g or t
aaactgggnnncaacatgaagaagctggagaattgtnnctatgcagtnnagttggggaagaatcaagctaagttttccctggttggcatcgggggacaagatctcaatgaaggaaaccgcactctcacactggccttgatttggcagctaatgagaaggtacacgctgaatattcttgaagaaattggaggcggacagaaggtcaatgatgacattattgtcaactgggtgaatgaaacattgaaggaagcggagaaaagttcatccatctctagtttcaaggacccgaagattagcaccagcctgcctgtgctggatctcattgatgccattcaaccgggttccatcaactatgaccttctgaagacagaaaacctgaatgatgaagaaaaactcaacaatgccaaatatgccatctctatggcccgcaaaattggggccagagtatatgcccttccagaagacttggtcgaagtaaatcccaaaatggtcatgaccgtgtttgcttgcctcatggggaaaggaatgaagagggtgtaagtcccagtgaggaggcgatgcgcacactcctgactgctcagcatgggatgcccacggggagcacggagactgctcaagccattccagttttcaactctgtgacattatacaggattcca

SEQ ID NO: 10777 - DNA, 708 bp, Canis familiaris
  misc_feature (1)..(708): n = a or c or g or t
gnagctggtgttatacatgaangcggcacagctannagcagnntctctgcatctcgccaaagcccagatcaagtncgnnnngctgagcccatccacagctgtgaaacaagttgtcaaaaatctgaacgaacgatataaattctgcatcaccatgtgcaagaagcttacagaaaggctgaatcgcttcttctctgacaaacagagatttattgatgaaatcaacagtgtgactgcagagaaactcatctataattgtgctgtagaaatggttcagtctgcagccctggatgagatgtttcagcagactgaagatattgtttatcgttatcacaaggcagcccttcttttggaaggccttactaagattctccaggaccctgcagatattgaaaatgtacataaatataaaactagtattgaaagaagattgtcagcactctgctgtagcaccgcgacgctgtgagccgcagcaggcttgtcccgcggaccattgctgggcctggggagagaagtttgggatcgaaacttgggttctgtctccccacccccaggaaaccctagttcctcacctggtgactaccaaagaacaagcaggacttcaaacaggaaaaacaatccaaaaactacatacttgtaggaaatctgccttattggagacgtcaccccttcccttttctctgtagaagcaggagcaagagtattccactt

SEQ ID NO: 10778 - DNA, 633 bp, Canis familiaris
  misc_feature (1)..(633): n = a or c or g or t
ccaaggctgtnggcgagaaatcgtgcaactgcctcctgcttaaagtgaaccagattggctctgtgaccgagtctcttcaggcgtgcaagctggcccagtccaatgggtggggcgtcatggtgtcgcatcgctccggggagaccgaagataccttcatcgctgacctggtggtgggactctgcactgggcagatcaagacgggtgcaccatgcagatctgagcgcttggccaagtacaaccagatcctcagaattgaagaggaactgggtagcaaggccaagttcgccggcagaagcttcagaaacccccttgccaagtaaggtccaggtggcgcaccctgtggtcctgagtcagctcgttagacctctgctcccccgggcagctcaaggcccccagcccaaagtggcagggccctgtgctagttagctgccctctcccttccccgtgatgttctcaaagcttccttagaattgctacagaagccagagttgacatctggaaccctgctgggaaccctagctctgtaaacatgtaattggtccaaatcattgctttctcacctcacttccaccaagcatctggagccaggtctgtctatgtaataatctcaaggtgtccacaggcaagatcccc

SEQ ID NO: 10779 - DNA, 623 bp, Canis familiaris
caggtggtaccatcactagtgcccagaacaggggttaatacaggcagagagagcctgcctcggccttggcatcagccacacaaagcacgcgctgccctggacacccataaaaccctctatcttctgcccttcatggatatttgcagaccagagtccagagaaaccccaggaaaggcccaagcgggacagaaacccactttggtggtcacagctaaggggtcccttcttgcccagacacaaaggaggctggctctctggcagctgtgtgtgctgggtacacaagaccacctttctgtccttcgcaggcctgggatgacagcctggctaatgcccacaagccccagcagcccaagcagtctcagggcaagtgcaaagcctgtgctcaccctgggcaggatgcttctcatcaagccccacagattccattttatctgtctgacctttactgagtccctagttccatcacactgcaggcccatgaaaagcataggggtggggacaagtccgtgcagaaaactacagtaagctgcttacaaatctgaacttatatacacacagagttctttccctatttctgggcctccagtgtttgtcaagaacacagtggtcttaagtaactgcct

SEQ ID NO: 10780 - DNA, 550 bp, Canis familiaris
  misc_feature (1)..(550): n = a or c or g or t
catgtggtccccaatgacatggaaagcttgnngcaaaaannggtcagagtgctagaagaaaacctcattttgtcagaaaaaatccaacagttggannaaggtgctgccaccttggtggtgagtgggcaccagtcacacacttacgacgatcttctgcgcaaaaaccagcaattgaacatgcaagtggcttgcctgaatcaggaacttgcccagctgaaaaagctggaggagacagtggcccttctccatgaaagtcagagatccctggtggtaactaatgagtatttgctgcagcagctgaataaagagcaaaaaggttattctgggaaagcactcttgcctcctgagaagagtcatcattcggggagatcatcaccctttgggaaaagcacactgacttcctcctcaccagtagcacatgacacgggtcagtatctaatacagagtgtctcagactctgttccagagcctagtttatggagctagcactgagcaccttctctgcagcttccctnttggccccaggggnnnnnngtgtcattgccactag

SEQ ID NO: 10781 - DNA, 575 bp, Canis familiaris
  misc_feature (1)..(575): n = a or c or g or t
gagctcaccnagcagatgtttgatgctnngaacatgatggctgcctgtgacnnnngccatnnncgctacctgactgtggcngcagtattcaggngnngcatgtccatgaagnaggtngacgagcagatgctgaacgtccaaaacaagaacagcagctactttgtcgagtggatccccaacaacgtgaaaacagctgtctgtgacatcccaccccgggggctaaagatgtctgctaccttcatcggcaacagcacagccatccaggagctgttcaagcgcatctcagagcagttcacggccatgttccggcgcaaggccttcttacactggtacacgggtgagggcatggacgagatggagttcacagaggccgagagcaacatgaatgacctggtgtctgagtaccagcagtaccaggatgccaccgccgaggaggagggggagttcgaggaggaggcggaggaggaggtggcctagagctgataacctggtaaagcgcgtggaagctgtgtgaactctttattcgctcacaacctgttctctgatagccgtgtctctgtgtgcactcgctcttt

SEQ ID NO: 10782 - DNA, 553 bp, Canis familiaris
  misc_feature (1)..(553): n = a or c or g or t
aatngaatttttttncaactatatgtnngnatgcagtggtgcccagaattagatatctttaaagaattttaaatacaataaacacttcatattattcgccttgttacattcaatgcaattctcaagtctttaaagaggactactgttcgaagatttttggaagaaaactgaaaacggcttaaagtgaagatcgacattaaaatgaggtgaaagaaaactatagtggcatagaaaaagtataaagctcagttagttgttttttgttttgtttttttgtttgtttgttttgttttgtttttttaattaaaaattaattcaggactgatgtgaccttaccagatttcagaacatgtgttgatagcatatatatgccactgaaaacttaggtcctgtatcatatttttttctttaagactttttaagaaatattacctaaacatgtggcttgctcagtgtttaattgcaagttttcattcttggactttgaaaacaggattaaacgttagtatttgtgtaaatcagactaagtgggattccatttttacaactctgc

SEQ ID NO: 10783 - DNA, 619 bp, Canis familiaris
  misc_feature (1)..(619): n = a or c or g or t
atttattgtttccattgatttgatggatntatcctttaacccgaattctaagaagtacgaaagaatatcttggtccttcaaggnnnnnnnncnntgaannnnnnnncnnnnnnnnngcatcannnaggtgcagaagaatcaacgatgatgtcatacttttccaattaccggattcannagcttcaaccaaaaatagcnctgagcacagtgacagagctgcagtgcccggtgctgcnnagcggggcgctccagggagagccagaggcggcctgcagcgcccccgagcntctggactggctgggcnnnntcttcagtcgcgcggatctcaccaacgagcctaatagcttcgtatcgacctactgctgtcctcagccaagcacagtggtggcaagagcttatttgtgtacgatcacgggtttcatacttccggagaagatctgcctcctcttggaacagctgtgccactactttgatgaaccaaagttggctccttgggttacgttgtcagtacaaggctttgcagacagtcctgtttcgtggagagaaaatgaacatggttttcgaaaaggaggagagcatttatacaactttgtgatttttaataatcaggactattggc

SEQ ID NO: 10784 - DNA, 634 bp, Canis familiaris
  misc_feature (1)..(634): n = a or c or g or t
tttcnngtgatgaaagaaaagatgacannacaaccctacatgtgtatgtnntgaacacagagctgcaaaatacaagaagaaaatttgtagaatagaaaggatagtcaagtccacagttagaattgattactttaacatccttctctcaacaatgcatagaactacacaaaattagccatcatcatcaataagatctaatgggtattaacaaaacactttagtcaacaaagtagaatacagattctttccattgtccacagaacatctatcaagacagcccacatcctgagctgtaaaacaaacctcaacacattgaaaagaattaaaatcatactgaatgtgctctccaactatgatggaatcaaactggaaatcaatgacacaaagatgagaaaatctccaaacacttggaaactaaacaagaatctataaagaagtctcgaggggaatttaaagatacatttaactgagtaagagtgaaaatgtagcataatataacttctgggacacagctaaaatggtattgaaagggacatttctagcactaaaatcacacattagagaagagggaaagtttcaaattaataatctaagcccctcctaagacagctacataatgaagagcaannnnnnn

SEQ ID NO: 10785 - DNA, 669 bp, Canis familiaris
  misc_feature (1)..(669): n = a or c or g or t
tttccctaaaaatgccgatgggacaatccgctatgactctacccactacaaggagacctngaaagctctnnaggcactggtggctaagggactggtacgagcactgggcctgtccaatttcagcagtcggcagatcgatgatgtgctcagtgtggcctctgtacgcccagctgtcctgcaggtggaatgtcacccatacttggctcagaaggagctgattgctcattgccaagcacgtggcctggaggtgaccgcttatagccctctgggatcctctgatagagcttggcgtgatcctgatgagcctgtcctacttgaggagccggtagtcttggcactggctgaaaagtatggccggtctccagctcagatcctgctcaggtggcaggtccagcggaaagtgatctgcatccccaagagtatcacaccttcacgtattctccagaacatccaggtgtttgacttcacctttagcccagacgagatgaagcagctagatgccctgaataaaaattggcgatacattgtgcccatgctcacagtggatgggaagagggtcccgagagatgcagggcatcctctgtacccctttaatgatccatactgagaccaccacttcctggtttccttccagctcttcaactacaaggtcctgccacccccagaaag

SEQ ID NO: 10786 - DNA, 638 bp, Canis familiaris
  misc_feature (1)..(638): n = a or c or g or t
aagatccagttcatcaaccaacttgagaaaccagtagaaccaacttttaccatgacactccttngaacaaaagaggaaaaccagaaaatnaccatcactctggatgaagaaattactagtaataaaacctattcctttcttatcacactggatttggatattggtgagctggtcatgatcaagttcaagtgggaaaatggctcagtatggaccaatgtctggaacacggtccaaaccatcatcccatggagcagggggcccctctactcaggccttgttgtaaacaccatcaaagtcaaagcaggagaaacccaacaacgaatggcattttgctcagaaaacatggatgggcaacagctcccccaaacccaggagaaaacctttgtgaggtgtgacataaactctcaaaaattgaagaggaagatcagatgagctttcatgaagccccggcgggaagaataaatgatctgatgcctcatctggaatggttactttctttggaaacccaagttatataaacaatcttgcataaagtttaaacaaagtttagcttcaagggaggagtgtgtttcactattctaaactgaacagtttaaaaaactatattatgtaacagtattcaaatattggtgtaacta

SEQ ID NO: 10787 - DNA, 596 bp, Canis familiaris
  misc_feature (1)..(596): n = a or c or g or t
aaggggaaaaccaaagtgggtgaggtagggggccccnctgtnnnngccccannagcnnnggggtgttgggnnagctgggcacagctgtnnagctgctcctcaattctgtcttgctctgaggatcgatttaacccgaaagctcccccagacagaaacacctccctgccccattggggagtgccaggcagtcacctgtggcccatcccagctgtgtctgtgccacccagaggttagcctgtgtgtaccctgcctcctcaaggtcagtgtctctgctcctcccctcgtgcggtgtgattcagtcacgtcagacgggtaaactggtactaacacttgcttttcctgcgctcacacactggtagccttggagcagctcttgggggtgtatggagcccacctgacagtccttagggcctccccagataggtgtgctgcggctgtgccctttacctgacctgggggtttgcggaatccatgtgtattagccacagctgacctttctctgtgttctgatctgtgttggaacagtacatgtagattctttttcagtgcagttccagaacatcatgtannnnnnattgggaaatatttaccttatt

SEQ ID NO: 10788 - DNA, 610 bp, Canis familiaris
  misc_feature (1)..(610): n = a or c or g or t
acagtcccctttnctctctnctctcacntatacntgcctctttcttacccctgttcccccataccacannagggtttgactctaagaggtgctgcccaaatgctccctaagcatcagtactcctggagctcaggacaaatggttcccctggccatgggagcctcagcaatgatccaggtctctaatggggccctggaattgttgggcaggatattgttgcatttgaaccaaaaaacatttttaaattgaaaaaaaaaaaaatctcctgaatttcccaagtgcctgcaccacctactccctttgtcagaccccattttcatgtcactgcatagcttgggccagaggctcagaaaggacacagctggtttagggaagggggtggctaaggaagatggtgtcagtgacctcttccctcacaccctttccaccctctagacancnnttttccttacctgtttttgctatggctgtaaaggtattttccttttgccccactccttcccatgcctttactctgggatcctattttgggcctggggtgcaggcacctggggctggtcttaggagggtgctaggctgcannnnnccttgtaccccctgnncaccctca

SEQ ID NO: 10789 - DNA, 511 bp, Canis familiaris
  misc_feature (1)..(511): n = a or c or g or t
tcatgctatgccgctgggaagagaaagacnnnnnnnggtgtttagannnanncaagcttgtcaaccagtgtgcnnnngacttcttcaggcagataaagcttcactgtgcagagccttttacagactattggacatgcattgattattctggcctgcagttacttcgtcgctgtcgccaacagcaggccaagtttgacgaatgtgtgctggacaaactgggctgggtacgacctgacctgggagagctgtccaaggtcaccaaagtgaaaacagatcggcctttaccggagaatccctatcactcaagaccaagaccagagcccaaccctgagatagagggagagctgaagcctgccaaacatggcagccgccttttttttctggaccatgtaaagattggtccatggcccacgctcagtcacacgcccagacaaccactgatgaaattcccgtgcagtttgcatcggccgtttgagtgttctttccgggatcacaaactgaacaaaaaagt

SEQ ID NO: 10790 - DNA, 531 bp, Canis familiaris
  misc_feature (1)..(531): n = a or c or g or t
ctcagacaccgaggcctcagagngtccagaagggctgggtggtgctganntgcggngncgganntgggccacagctgtagcactggcatggctagagcactgctgtgctgcagcctttggcgagtgggaactagcagcagctaaagcagactgttggctgcgggcccagcacctgccagatggccttgacctggctgccctcaaagccgcagcccggggtctcttcctgctgctccgccactgggaccagaatctgcagctacacctgctgtgctatagcccggcaaatgtgtgagggctgcccatcgctctggctggcgctgtccaacagactcaagtcactgccacccagggccggcttctcggtactgggaggggcaggctggtgtcagcctgacccccactgcttctcatctccttcccagaaaccccctgccctcacagaaagtgcctgcctgtgctctctccccctcctcccaccccatgccctttcccttctgagctctgtgcagtgcagtgggaggggagaga

SEQ ID NO: 10791 - DNA, 649 bp, Canis familiaris
  misc_feature (1)..(649): n = a or c or g or t
aaagacccttttcaaactgttacagatgaaaatgggagcctcataaagatgcctctctgttcgctccctcctcttcggctccaaggtcacctagtgataagccatagaaaaaactagaactggggacatggggtggggagggaggggattggggaacttccccttttgtaagctgagggcaaggggtggggatattttttagtttgtgattttacatttatctgtacatactttttcgaggttgatcatttttgtaaccatggttttcctgaaattctcgactcatctgtatgaaggaaatgaaccaaatagacttcaatgatacgataagtaacaatacatgtgcatataactctaattgacacgccgccaaatatatttgatttccaggtttgtatgatatggttcttaatcctacacttgcgtatgcctcaacgtaacgcatctttaaagcttccccccttctctgttgtcattttgttaagccatcttgaagcgatgttgtttaacataaatcgtgctgttgaatttggctttacgggtgtaaacactgatggtgtatcagaatctgaggccccaaactctccaaacattgatggtgcattttgttctttaagtgaaacccatgcaataaaataacagannnnnn

SEQ ID NO: 10792 - DNA, 525 bp, Canis familiaris
  misc_feature (1)..(525): n = a or c or g or t
ggcttagggtgtcagnnnnnttccgatggtnnnnnnnacaccatnnnncaannacaccccnnnnngagttctagagctgtgncgtcnggcngaaatagaacatgagacacatacccgattttgaannnnctagtcacgttaataaaagccaaaaggcaggtactgtatcatacacattattcaatggctccaaatattagcacagggccctggccccatcatggccactgtattggacggcacagctctagactctgcttctagaactgtctgctggctgctggcaagctcctccgtgccctgaaccttgggtttcctcagctgtgaaacaggagcccgttcgactgtgctctgtgcctacctcagggggagcccggggctggggttccaatgcctggaagctccagggaagacggagtgagtgcttcccggtgccttcctgctgtcactagctctggacctgccttttcaagaagcaactcttcagtttgcccgactgccttacgccagcagcagcaaaaggat

SEQ ID NO: 10793 - DNA, 625 bp, Canis familiaris
  misc_feature (1)..(625): n = a or c or g or t
tcnnnaatggtcggtacntgcgacgtgagctnnnaggccctgtgctgaagaagctggctgagctcaangnngttttnnagcgacaggagtcctaccgcttctactcaagctccctgctggtcatctatgatggcaaggaatggcctgaggtggccctggactcagatgctgaggacttggaggacctgtcagaggagtcagctgacgaatctgctggtgcctatgcctacaagcccatcggcaccagctcagtggacgtgcgcatgatcgactttgcacataccacctgcaggctgtatggcgaggacagcgtggtacacgagggccaggatgctggctatatctttgggctccagagcctgatagacattgtcacagagatcagtgaggaaagtggggagtgagcttgctggctgcaccagcacccgagagactctctgtgtcccaggcacagctgtgctgcgtcggggagaaggccagtatggccaggccgttggcccctgcagcctggagctgatgtgcagaggcctctgtgagtcccagcctgagccagccccaaccgcgtttggagtcttttatttattttaactatttcttcaacattccacatttgatgatgcagata

SEQ ID NO: 10794 - DNA, 493 bp, Canis familiaris
ctcccaggcctgccgcagagaaggccaagaatgaggagtacatgaagaagctgcacatgcaggagcgggcagtggaggaagtgaagctggccatcaagcccttctaccagaagagggaggtgacgaaggacgagtacaaggacatcctccgcaaggcggtacagaagatatgccacagcaagagcggggagatcaaccccgtgaaggtgggcaacctggtcaaggcctatgtggacaaatacagacacatgcgcaggcaccgcagggccgaggctggcgaggaggcgcccgcccagggccctgagagctgagggcagggagagcggggggcgatggcccccgtccccaagcaattctgttgggagtggcagaagcagaaaactctgaagacacccagccagcactcctgcattcagggttctgtgatcacacgtgctctgtgcactgggcctgctcacagtttaaaactggacttttttatatgtatattata

SEQ ID NO: 10795 - DNA, 585 bp, Canis familiaris
  misc_feature (1)..(585): n = a or c or g or t
atctccgagccagaaatgcctttgatcccacnnctgtgnnannagcccgctnnttngaagttagacacatgaagcagtggatcaaagattactatgccaannngagaaagaagcactgagcaattttgatcattttcggtttcttttatgttcattctacccatgttcccattcactttggttttctacatgtaattactttcccttttttgtcattagatttggtggggcgaaggttgagatagaagagagggtgatggtggtgacagcagccatcacacatcccaggtcctcgccatcttcatgccacctccnngaagaatctctttgtgatagtttttctacaccatccgtggccctcataactggagcagagttttcgactgcctttcacaagagggagagttactcctttgtttctctgcaagcagagctttctcttcattttgagattaaagtctctttggtccatttgttacaccccatccccccccaaagaaagaaaagcagaaaatagattaaaatgatgtaattgcagctggtaggaaggncgtccaatgccaatccaggaaatggaagtcattc

SEQ ID NO: 10796 - DNA, 568 bp, Canis familiaris
  misc_feature (1)..(568): n = a or c or g or t
tcctcccacgctggggcgnntgtnnnnnnnngtttcannnaggctggctnctcatctgagtgtggctgacaggcaggctgcttggccccaggnanntgcaacatgctttctgagccacaaatatgtcacaccatgggtaccagtggccgccctcctccaacccccatttctctccnnnncttcctcattcctaaacccacacctcataatcccagtagccactgccaccttacctgtgctgctcctcccccacaggccctctctcctggagttccttccaagaagtctgagaaacccagacacacatctagcttcatctaggaaaacaaatgaacagctgtgagtgtttccattgtgccaggggtggcttgtggtgctttgctcatgttgtttcatacagatctcacaacaacttgagaaggaaatgtttactgctgaaggtccttagggtactggaccggagattaggaaatggcaaatctagcattcagccctatgttcgtctatctctaaggccctcatcctttcatgtctacagttgctcagctagcctcattcagtcttccca

SEQ ID NO: 10797 - DNA, 547 bp, Canis familiaris
  misc_feature (1)..(547): n = a or c or g or t
gtcactgataccgaagannctgccaaaattgannctgagaacaccatcacctactcgctnntccagcaccnnnnnnannagacagaggccccggattaccagaaccagatttagtctccatcgacttgcctgagacccggggaagagaatccgagagacggggatgcaggcccgagttccccgtgggaaagacaagaggatgccacagctccagagaaggagggggacccttccagggtcatctgcgtgaatcctgaaggctccctgtcctcaaagtcacagactgtactggttccttctgtgtctcagcacctctcgccatctagactcttctccatacatccacaaagcagatacaaattacttggattaggagatcgtagcaacatgggaaaggcttatgttataggttacctgagaaaaattatgtaggtgtatatgattcaggaatgttgaaacagactgacgtttgccaacaacttagaagtggtggtttcggggtgatgagattattggtgattttcatcttctttctttatttttctgt

SEQ ID NO: 10798 - DNA, 391 bp, Canis familiaris
  misc_feature (1)..(391): n = a or c or g or t
agggacattcaacacaacaaaatttgcctcctcctatgtgtctgtgagcnngcaccatatttaacaaattgggaatgggtttgggatattactgcgatgtgtggtggttgtggggtgggggtggggggaggcagtggcggggagtgatccaggagagtggttgatgttaatactgttttgttgctctgttgggtgatatgtgaaatactgtacataggcctgataaattgtgggattagatgtcctctctggacagagtttacctgctatatagaccatacttacgtgtggagtgtgcaagcttgctgtagggttgagccctggctcccagcagctctaagtcagcattttgtggctggttgtgcctcagctgtccccagcaagcatggga

SEQ ID NO: 10799 - DNA, 93 bp, Canis familiaris
  misc_feature (1)..(93): n = a or c or g or t
tgtaatgnnaagttgtatagattattaatgcatgtccactaaatataaccctggttttgtgatnnnnntgcttagattttnnnggtgatatta

SEQ ID NO: 10800 - DNA, 492 bp, Canis familiaris
  misc_feature (1)..(492): n = a or c or g or t
ctagacgagnnagctcagaactcaaacccgagnagctgagatcattgcccgaaggcntccctnnngggtgctctctccaaacagccaggatctgaggccagagtcttgtttccctctacagagagaccagcagctcctggccagtcccaggtagagggctcagtagggtcatggtgctggtatagatgtgggaagtgcatactcctttggtttcctgcccacacctccaacctgacccaatccttggccgggatgtccgcagccaggctccagagaccctagaataccctcacctgcaggctggctagtttcttcccagtgccaccaccatctgctccagggacaaacaggcagacatgctgtgctgcctgtccccagaatcttttctgtcctggccttggctgacctctgtgaatgggtttggtaagggcagcaattgtggaaagcagaaagagcatgaggcccaggggtggggtggaggagggggctgct

SEQ ID NO: 10801 - DNA, 527 bp, Canis familiaris
  misc_feature (1)..(527): n = a or c or g or t
cctcnntcatgagagttgctgttctactagctgactgaaatttgatgtatcctctcacctcaacttccacaagtcaaaacacgtctgtgctttctggtcacccacctaccaaagcaatcctccatttgctaatgtgtgccaatggtcgcttgacttcacctgggatgctgactccaactccagcctaaacatctaaagtgattgcttccttaactcttgaacttcagtctcctggtcctttaacctcttttacatcccgctttttattgcctaagccgactggggcttgcttcatctcttggctttgctgtggagcactcctgtaaagccagctgaattgcacactgaagatccaccctttgtaggaagctgaggtttggtgatatcacttaccagagatcaagtagtcagtagttgtggacatcaggctgaaactcaaacaattgaaacccgagtccatttctacctgccctgctgtacttcttcctgagaggtgagatgagtgactacatgcatgaaaggaagca

SEQ ID NO: 10802 - DNA, 635 bp, Canis familiaris
  misc_feature (1)..(635): n = a or c or g or t
cccattgccccagagtgtcanctactgggtngtnnnnnaaaatgtttatttcagnnagtatgctttttctccgttgtgttctgtgaagacacacacatttatgggattttcactctcaaagtcttacagctcagtgagaaacagcaacctagagagccatggagattgtggggggtatggaggggagaaaaaaagccggaagttggaaaaatcagcagttactggtgcctgagggaatcagatgttagtagtattattttagttgagagggcttgaaaatcaaagtatcttgatttacataatagagggcttgaggcgctaagaacaagtcaaatagtcacgactgccaccctctggcttctgtaatcattggtgtcggcttcctttttgcctttagtcagatcctcagcaaattcatagagattgggagggatgtgcaacataaaagttagcggtagtttgtgtcaggattgccaaagaggatgaaatacaagccttcccttagttttgcaatttgcagttgacggcatctccagtccacttccctggcattgctcatcaacctgaaggagcggatgattcccaaggcagcttccactagggatttgtaagtannngttttgtgacacattttg

SEQ ID NO: 10803 - DNA, 613 bp, Canis familiaris
  misc_feature (1)..(613): n = a or c or g or t
gaaatnnaggcacagagaggnnaagtaanctnnnnnaggtcagagctcgtnagtataactctgtcacacttactttaanntgcactatagctatctgcatacctgtttccacatcaccaacaaaaattgaacttttttcctttcttcaccagttacagaacacatgattttttacctgagattgtggctatgtgggaggggaaaaaaagctatgatttttcacctcttcatgggacctaagtaaaagcagtatgcgcaacttctgggaagtatccttcagagaagagtgagcttgaagtggggctctgtccctttatcttctccccactaactagtaatattgatctgatggcaaggaaggagcaatcttcttggaacatcaggaaaaagctacattttaaggtgaaagaatgagaaggagcctggatctctcatgatcaagtagttgccagtgctcgaacttttcacgtgaggaagaaacctccatctctccaaacccattgttactttgagtctcctgccactcacgccaaagcccatcctaattaatgggattatccatccctggctccctgccccacactagagtgaactctaagaaaatgcactctat

SEQ ID NO: 10804 - DNA, 616 bp, Canis familiaris
  misc_feature (1)..(616): n = a or c or g or t
cnagcnnccacatcaccacggtcatcaacgtctccgnnnnnntggtcaacaccttttatgaagacatccaatacgtacaggtgcccgtggccgatgctccgagctcacgactctacgacttcttcgacccgattgctgatcacatccacagcgtggagatgcagcagggccgcacgctgctgcactgcgctgctggggtgagccgctcggccgcgctctgcctggcctacctcatgaagtaccacgccttgtcgctgctggacgcccacgcgtgggccaagtcgtgccgccccatcatcagacccaacaacggcttttgggaacaactcatccagtacgagttcaagctgttcagcaagaacaccgtgcacatgatcaactccccagtaggcgtgatccccgacgtctacgagaaagagatccgcttgatgatgccgatgtgaacagcgcccgacacccgctgaagatcctacaccaacaccgaacccgaacgttaaagttttgttggcaaagaaaactagatgccttttagaagggcgagcaaaaaaagaaaagggggacagttggactttttagcttagtgagttttatctttaaagaataaaattcnnnnnnn

SEQ ID NO: 10805 - DNA, 492 bp, Canis familiaris
  misc_feature (1)..(492): n = a or c or g or t
gtgatagaannncaaactgatgaagtcctgaagcaactgagactaannnnngtttggtnnnaataagttgtgcnnnnnnnaaaataggctttttntactnnagctngacatacatgtaaantnnnncggtgtaattatactnctaggcatatatccaacagaaatacatgtttactagaagtagtagttagtagtagtggtagtagtattctcaatagcccggaagttgtaaccgcanaagtggnnnnnnacnnnaaactgcatacataaattgcgcttttcttccagtgctgtattctatagcagtaggaatgaatgaaannnnnattgtatgcatgcaaaagaacacagaagagtaagtgctatgtttttttcattcaagaagcagataaatgtaatncttggtgtnnnnnnttggaatgatggtttttggatgatggcagtttgcagagattgacttaagggggctcctctggtnnnantagtattctt

SEQ ID NO: 10806 - DNA, 525 bp, Canis familiaris
  misc_feature (1)..(525): n = a or c or g or t
cagaacaaaggaagtttttagcgagcgaccactgttttaatgataaagattatgcctcgatgtcactgtgctcctgggtcaatgtggtggttggtagaatgactgccatagaccgagcagccaagcacgtggtggtctccaaagaggaaattgtgctctacgatcacctcatcctctgcaccgggcagcagtaccaggtcccatgccctacaggggctgatattaatcaacacccgacaaacagagagattccaaacagtgggaagcagcgatacaccgataaagttcctcgcaatcatttcactctcaatgatgaagaagattgctgtaaggccctgagttggataaggagcaactccatcatcacagaagactgcatcatacattgaggtgtgatttcatggccggactaccaaatccagaaatcccttccttttcttcatttcactagatggttttcatcctggagaatccttcatctttagagnnnnnngcatgatagtgaannnnntactttctaggggg

SEQ ID NO: 10807 - DNA, 479 bp, Canis familiaris
  misc_feature (1)..(479): n = a or c or g or t
gaacaggagtgtgtgnncttacaggggctgctttgacaattacagacagtgaaataactggtgcccagggtgctggtgttgaactgtatcctgggagcatagctgttttagaaaggaatgaaattcatcattgtaataacctcagnnncagtgacaattcaaaaagcaccttaggtggagttaatatgaaggttcttccagcaccaaaattgaagatgactaataatcatatttacaacaacaatggctatggtgtaagcattcttcaaccaactgaacaattttttatcgtagcagaagaagccctcaacaaaggggcagcttcaggggataaaaaagaggacagtatgctctccagggtaatgcagaatctgaacctagagatgaacaacaataagatagaagcaaacttgaagggggatatcagaataatcacaagttaaagcatctggatttatgttatggtttatatttcagat

SEQ ID NO: 10808 - DNA, 546 bp, Canis familiaris
  misc_feature (1)..(546): n = a or c or g or t
tgacttactcctttctatcatagcacnnagcacagtgtccaattacgtatgtgaatggatggatggatagacagataaatggggtagggaatggacaagtgtgggtagatgggtgaaagaatgaaaaggaatttaaattttctcaggtattgtatttaattcttgctctaagtgtgctgttgttctaataaagagctttatttctttttctttaaagagctttatttcaatagaaacatatgattgaaagagtgggaatgtggtgatttttgtaaaattttgttgactccagaaagcacaactaagaccaatgtgcttaacttagattaaagcaagttcccatttaatatgagagaaattactaacacccagagcttttaataatatactaggttgctttgttgagtagagagcttccattcacaggaagcatgcaggcagaccccaggaagtaatcagtcaggaatgatatagaatattcttctgtattgagtagaaatagtgatcctttccaattttaaaattttagaatnnnnnaaagagann

SEQ ID NO: 10809 - DNA, 445 bp, Canis familiaris
  misc_feature (1)..(445): n = a or c or g or t
gnnctcctacccatctttgctggagccaataacccagaaagcgggtatgctggccagagnncctgnagcaagaacttttagtttatattgnngctgaatgttataaagggagaatcctacaagtcccaaaacctttgtctgtgggctgcttgtaaatgtcataagtagtttgcacaggagtaaggactgaaatgttgataatatcaatcacaagaaggtgaggaatctggaaatannagtatgtaatgtgcagcatttctctccagtgaagaacagaaaccaaaccaagccatgctttttgttnnnnnnnnnctgaaaggtgtttctcagggtcccctttgcccttcattgctgccacataacatctgggaggaaggatgatgaaaagcctggggaaaaggttctcttgtgaaatggacaagttcttctcttgtgttaaagtaca

SEQ ID NO: 10810 - DNA, 603 bp, Canis familiaris
  misc_feature (1)..(603): n = a or c or g or t
tctgcccagagccaaggaccagtcaaaagcaggtcaattatggncagtgagactcccgaggctcaggcactcatgacagctgttggacagattctagaagagaaaatggcaattcaccatggacttcatgccacaaagttaaatgagcacaaacaggaactccaagcaccagtatgtgggtgtttctgctaccacaggcttccctgctacccagaacaagggagaataatgaattttacagcccatggtcaccaagcctcctccaagggccagagaagctctatcagggaaaggcaggtcaaacatcgacagaccttaaaaagtgtaagattcaaggatgagcagctggggagcaacttctcatccttgccttccaagaagactctgtctccagtcagtccctgccagtatgggccaaggatgccaagtgtcccaggccaccatcatcactgcccacggcattgtcttattcagggacagatcttgtctagtcaattataaaatgcttctttagcccttcctagtaggaaaacgtctccaagaagaaaattagtccatgtggagaaaatattttttctccttagcacatccaaatacttaata

SEQ ID NO: 10811 - DNA, 327 bp, Canis familiaris
  misc_feature (1)..(327): n = a or c or g or t
gcaaaacatcatcccagttctgtgcagacgcagggcacatgcncnccggcgggctgagcctgaatccaagagcgaaggatttctggttttgttttttgaatgagtagcacatggccttctttcaaatttggcagaaatgctctttgaacagggaaatgcaatcaggtgtttttttttgttgttgtttttgttttttttaacggaagagaggcattcccccaagttgctatgaaattactgctataatggggcattagcgtcctgagctctagctggggaaggagccagaggtttttagataaaggtatttgaagactgttttgagaa

SEQ ID NO: 10812 - DNA, 535 bp, Canis familiaris
  misc_feature (1)..(535): n = a or c or g or t
agaggctcctggaatacatgggcttccagctgcgccgcnnngtcttcnncaaggagagccagtgggacccgaaggtgctgaacctgagcaagagagcggagctgaccccctaccaaaggatgaagcggaaaagcaccagcgtgtccaaagccctgcacttggaggagcaggagctggtcccgttcttcaagttctgctaccagtgtggccgctccatcggggtgcgcctggcgccctgcacccgctgctacgggatcctgacctgcagcaagtactgcaagaccaaagcctggagcgacttccacaagagggactgtggcaccctgtcggccatcgttccttgtccagggccccacctggaggacttgccgtggagggtggaagagactcagtaaggagccgcacccggcgccacggcgtggggagggcccggcggcagcctgtgcctcgctgcctccccaccgcgggcacccacagctcgggtgcctccacgccgctggcccggcgtcgtctgcctactggccggagtgtgccc

SEQ ID NO: 10813 - DNA, 492 bp, Canis familiaris
  misc_feature (1)..(492): n = a or c or g or t
aaggattnncnnnnngaggtggccagnnnnnnnaaaggacccagagagtgatacactggttttcaacaacatgcttagagaactcttgaagcgnattgggtgtcaatccagtgaacacaattgttttgatttaatttatttttcaaagtttatgtggtggtggtgtggctttccaaaatgggcaaatatccaaatcaaaagaaattttttagttttcttctgccaggaatggaggagggggaatagagacataatccaagaaacgacacacgtgcctttctaggcattgctggctcatttcttggnnnnnnnngatnnnnntgagcagatttgcttggcaaatcctctgttgttattcatgaggatacagaatgtgcaagggaagtgggctgacctcaggatgcccatgtccagctgcaccacaccatcttacgtcgtgctgccttctcgcatcctgccacttttcccttgcaaggttannnaaaaaaagct

SEQ ID NO: 10814 - DNA, 478 bp, Canis familiaris
  misc_feature (1)..(478): n = a or c or g or t
tccccccctttgcatgttcctnnngtccctcctcctcccaggtttggnctcagggggaccccnnnnnngccccagatcatgggccagagaggggatgcttaacaaaccctatcccagagtaactnnaaaattctctatccagaggcctgtggtggtggtaatgatagtggtgatggtggtggtggtggtaagtgtccgtgttcacaaccaggcaggcaggaccttgtcaggctgtctgtctctttccctcagccatgctggccctgagcttcaggatgtgcttgcaaacccttctcaagggtcctcacaaacccaacatctccagtctggcctgacctggaacttgtcttctagctcccttctcctgtccccagcctcatttcttaaatgactaggatttttttaatggaccatcctgcggagagggtgctcctctcttcctcccaccaagttgaggtggggtcttgcatctggggga

SEQ ID NO: 10815 - DNA, 184 bp, Canis familiaris
  misc_feature (1)..(184): n = a or c or g or t
gtttgaccctttccntagtnantgttgctcaaagtttaggcaataaatattcctattcgttaatgtttaggttgaaaatctggttatagataaaagaggaagnaaaggtgaaaatgagagaaccttatgcaggttgagagaatgcttaaaatagctcaccagactgtgcagnnactctttgtat

SEQ ID NO: 10816 - DNA, 620 bp, Canis familiaris
  misc_feature (1)..(620): n = a or c or g or t
gcagagcangatncaaccaggtanagaggaatcactgcaggtgctccaccctgggaagggtnaatgcaggcctccctgtgggtatgctgnnagggcagacagccatngtgaggctagggcagccagcccagcaagctgccaccaagccctggtcagagagaccaagaaagggatgaagttcccacactctgtgcacagagggcagagccctgacagagatgcagccactacaggcacagggcccggacagagaggggacactctggttctcccttccttacccaccaccactgcctcctatgactaacacaggcagagaccagctctgccagggtctgggacatgcaagggggaaggaaggagtctgagggaaataggcccagaatgagcactgtctttcagaatgactcaccagggcaaaccctaagagtcccagagctttctagaaacccgcaagggtacaactctgaaaatatcactcttcatgaacgaggcagacagctgttagaaaaacagccatcctcctgagagctacaggaaatgtagttaaataatcaaaactcagttcctcttagtctagacatgagatttcatacaattataatttcaagtgcaannnn

SEQ ID NO: 10817 - DNA, 381 bp, Canis familiaris
  misc_feature (1)..(381): n = a or c or g or t
atctgnnaggcactgacggtgcannnacnnntgtcttctatggnntgatgcacagcannnaataaacgatgcgnttttaagtgctatcnnngcaaaccccaagattggggaggaggggtgnnnnaganngtcgcgcnnnngcctggcccgnnnnnnnnttcagaaggtgataactaatagaagaaattgtnngcattttgggtnaaattatgagaagaattaacactgcactgctgcttctgnnaatgcgctcagaaagctcccagacagaaaagaacctatcaataaaaatataacaggaagaaattcgtcaggattctcttacgtgtcntcttacgtttatccactgaccaaatactgaaaattacatttccataggga

SEQ ID NO: 10818 - DNA, 387 bp, Canis familiaris
  misc_feature (1)..(387): n = a or c or g or t
cagggaccagcccaggaccccatgnnngccccaggtctgcaggngatgcctctcccgtgacagcaacctcagggccctgggnacgctgccccgctgggggtgtgtcctcctcccccctccccccaccctgacagcgggcgccacccggtctctcggggcccggccttgcttggcggttgtctttgtgcctggtgacgcgccctccttcctgccagcacctgtgtctgcggctcctgcaggacggacagtctgagctccgagtctccacgcggggcccacgggccgggcgtggccacgggcagcaggactgtgtcctcggtcccgggcacgaggcagcctcgccgcccggctggctcgggcggaggccggggcgcttgatctcagggc

SEQ ID NO: 10819 - DNA, 547 bp, Canis familiaris
  misc_feature (1)..(538): n = a or c or g or t
agagtaagnancatgtgtcattcatctatgtagtctccaaagnnnctccttccacagtgatttttgcacatagcattattcagtattttgaatacgtggctcagtgagcactactcaccagatgtacaatccgaacagatgtattcataaaacattttaaaacactatctaagagattaacttgaaaacaatagtattagaggacaagtgagcatttattcaattaatggatcaaaaaaatagaaatacttaacatactttttcccccccgttttacttcatgggcatgagtatattgttatctgaagatattttactttggtaaaatgaaaccaaaggattagggtaggttgatattttgatttcttttgttgttacaatattgtatatacaataaagatttgaggaagaattgtnnnnnnngggtaagatattctaggtttgaagtgatagaaannnaggttttnnnntncttttatantttaccanntgtgttatcttgggcaggttagttgacctgagcttattccatacctcttctataaaa

SEQ ID NO: 10820 - DNA, 466 bp, Canis familiaris
  misc_feature (1)..(466): n = a or c or g or t
agaagcagcgnnaggagtgggaggtgaaggcnntgctggagaaggtgnntgcaganctcatttgtctggatccaagagccctggcagaggttgatgtcatctctttggagcaagaaaagaaggagcggatagagagactgggctacgaccctgangccaaggctcccttccagccaaagccaaagcagaagggccgnnnctcgacagcaagcctggtgaagaggaggaggaaggtcatggataaggagnnnnnngacaaagtccggcagagccttgagcaacagccacagaagcaagagaagaaagccaagcccctgaaggcccggccatctgccctggacagatttgtacgctgagccgtgctccaggatggcctgagaatgccatctgtccccatgattgcctctggggaagtgaccctgttccttggaataaggagagggcnntntgccccttcctcagctgg

SEQ ID NO: 10821 - DNA, 526 bp, Canis familiaris
catgcatatgtcataccatcacacaaagctttgccatgggctcaatctccccccgggactttgtcgacttagtgtacttcaagcgctgtgaagggaatatggatattatcagttctaacagtgtggattttccagcatatcctccatcttcaaattatgtccgtggttataaccatgcttgtggctatatatgttctcctctgcaagagaacccagcacattccaaactagtgatgtttattcagacagaaatgagaggaaaattgtccccatccataattgaagcaaccatgccttccaacttggtaagcttcatcctcaatgcaaaggacggaataaaggcactgagaagtccatcgggatgcggacaccatcagggtggtcactcatcgttcctaaagaattaaggccgtagaaagcatgtgtggcaatgactgcggtttacttccaagtcagtatgcataaatactgttacactattctaggcaatatccttgtacacattactgaaggcactttgtgaaaa

SEQ ID NO: 10822 - DNA, 532 bp, Canis familiaris
  misc_feature (1)..(532): n = a or c or g or t
catggcacnnnnannnnnnntcccngngnnntnncannnngnntcagcctcnnnncagaacntgtcancnggtggttcagtcccantttgggtgtttgaccntnntacagnntgaggcttaggccccagnctgggacccagcagactgcccagnnnnnntcatncnntccctcntgcctgtccccctnnnttccctcctggggccatactannngaatnnnnnnnnnngattcgnntcagtggcagncttaggtccagtgcnnntcgctnnnccttggaatgagggtcaagagcaaaggaccctgtccagatgaggctgtgctccccagtgggnnnnngnntaaggaaannacagacccttgggcattccccctnnnnngattcnnnagggagtgccntgagnnncagagggcctgaggcttcccagttggnnngntgccnccannnctttngacacttataggttgggctgtacgaactcagcaggtctcactctcgagtcagaatgtgagtctgctanngttcattagtt

SEQ ID NO: 10823 - DNA, 488 bp, Canis familiaris
  misc_feature (1)..(488): n = a or c or g or t
agacatgnnccattgtaggccccaccaagnnagactccaagttcatcatcagcatgaacgacaacttctatccnnncgtcacatgggccgtgcccgtcagtgagagcaacgtggccaaactgaccaacatctaccgggaccagagcttcaccacgtggctggtggccaccaacacctcaaccaatgacatgatcattttacagacgctgcactggcgcatgcagctcagcatcgaggtgaaccccaaccgccccctgggccagcgtgccaggctgcgggagcccatcgcccaggaccagcccaaaatcctaagcaagaacgagccgataccacccagcgccctggtcaagcccaatgccaacgatgctcaggtcctcatgtnnnggcccaagtacgggcagccactggtggtgatcccgcccaagcaccggtaacagccagggtgccctgctaggccatagactcaaataataacactgctccaacaa

SEQ ID NO: 10824 - DNA, 652 bp, Canis familiaris
  misc_feature (1)..(652): n = a or c or g or t
tacgagctgaacannnacaacgtgactgacccgtcactctccgagatggtnnaantnnncatcaagattctgagcaagaaccccagaggcttcttcttgctggtnnaaggtagggccccaggcctggctgcagggccacttccctgggaacttctgggtatctagccttggggtgaggggattgggtgctccaactctcaaaggcagctgtccacttttgaagagaaggggaaattccttttggggaagatgggtcatgcatggtgttgaagctcccagcccaacgagctgtcctcctgtgggcatgaagatagcctgtcaggccaactaatccaggaaggcttcccaggagtggaggtgggagccttccttttgggggtccctccctgaggcctctcagcttcactcctcccaaaggacaagtcagcaggcctggtggacatctgcttctgagccactgcctggctgggctcgaggacacaggcccagagtcctcctccgcagatgcctatcaatctgcaggagccctcggctgggtggtgggcatctgctcttaccaggagattgtataaggtactcgttactgggtaacaaattatctccaacttaacagtttaagagtaaacctcaataaagaaagaannngaannnn

SEQ ID NO: 10825 - DNA, 631 bp, Canis familiaris
  misc_feature (1)..(631): n = a or c or g or t
aaagaaaagccagctcctctacacccttcttccatnaggtgacatgaaaagtctcttcctctaagacgttgggattgatgaggacaatttaatcggaacctatgaactagccaagggaattatccatcaacccaagaatctgacaagtcacctttatccttaaaggtacaacaacagttagatctgagtgagttgtagagttaatgcattatccagattttttcagaccactttttctcattaactatatatgcccaggaaaaattctttagcttgaatttacagaatttacatgcaggtcactttgacgtcacttctccatttgcttgatgcatgccactttcatcaattttgccattctttattcaaagtcctgtgactgccaatattttcattttataggatctctggtgctgctttgcatccactgcgaaaaatgtttcaccaaacaccatagcaaagctgtactagtcctgatgtgtattcttcttcaagaaggttctatcttcttcaagatagctgtttttacccttgtccttaagtatcagtcccattaattatgactcttcaatttcacaatgaaattgatttgtggtctactttgtcatagtatcacttcccacccctaagc

SEQ ID NO: 10826 - DNA, 546 bp, Canis familiaris
ccccattaagtctcatttcatcctgtgtctagctataataatatgtaatattcttttgcatttgcactctagtaaggtgtgcctggagatatcattcatctactgctcctggtgcctcttcatctcgctacaaagaagatgtgggacaggcttttgccacttcctgacatatcgtcctttgctttctctttcatccccacattttcaattacagcttcaaaatctatgtggttccagttaagacattgtactctctgaagtcctccttgggccaatttgatttagctgcaattagcacagaaaaatctgggactgaaagaaaggtgtgataaaagcccatatggcaaaaggagaagatagcttcatgcaaaatggtttactgctaatggaatgatgtttctttagctggcaaatttgtatgttgtgaatgccaccgccatggtggcaagtttttgataacctctaaggttgcactacctagcagatgttttctcaaaactttagcaaaagaatgttgcaatgaattttataaatgacttataaatt

SEQ ID NO: 10827 - DNA, 541 bp, Canis familiaris
  misc_feature (1)..(541): n = a or c or g or t
agactgagagacttgaaaggtaaagtaagaaggtacttgtattactgctgtcactcaaggaatcagaacaaatatgagtgctatggaataagaaatgtattataactagaccnnacncagttatgagggaagccaaaaaacataaagtcaaatgaccaaagaaaaaatcactattaaggaacctcaaagnnnagctgatgaagaagagatgagaagattattattgccttcaaatttggtggttgcctgaagttgctatatgtcagtaggatagtagttgataagaataacaggacacccaagtagaggaaagcaaggaaaaacagtaaccaaatagtaatatgttcaaagatnnnctgaaattcataaaaactagctggactcaaaggtcaaaacctatatatataatgtatgtgtatgtgtgaannnnnnntaatgggaaaaacctaagggnnngnnnnatcagttttnccattcagnnnnannnaaatgtatttgtcttacttggtttacatttttannnttatttaaacatacgtgc

SEQ ID NO: 10828 - DNA, 419 bp, Canis familiaris
  misc_feature (1)..(419): n = a or c or g or t
gtcaggtgattgaattccagaaaggttcattgactgcctttgagacttgggattcgaccaggaccctgggaagatcagnctgctgccagagtcccatcacagaggccccgcagcccaccgtttgggggggtgggtagtggcagatccagattcaggtcccatcacaggnnnnnnaggggtaacaggctccgantagtccctggnnntgtgctcagggtgtttgcttgatattcacagccagnccaggtgccttgatctcctgccagaggtcagcgccgggggtgtggcctgcccatcatacactgcaggggtgcanctggattnnnnnngcctttgtgccccacccccagcaggtttggatgccatgctgtccactcccaatatgggtccctgctctacctcagggcccaggcttctct

SEQ ID NO: 10829 - DNA, 480 bp, Canis familiaris
  misc_feature (1)..(480): n = a or c or g or t
taaactaagtcacaaaannngctacaaaatagggaaaatctaaattaaaaaggcaatattagtaaagtatagagtacattcataaaacattcttgtcaaagtaaaataacccacagtgagcactttttactaatttagttgtaaatttaactttgtaaaatagagaagtctaagtatttttaatgaattcaagcaacatatagcttaacgaagaaatcggaatgttaaaatatttctgtggagttataccagatgagtatgagtaagtctatgtatgaccagaaaacttagatattgaatgttctggttatctgatttaccaaatgtcagcatatttgaactttgagataggcaaggacattaaaaccatattgagtataatttgactccttggattcagaaagtattttggtatctttcagtgcttcagtgttgtcataatgagcaattatcatttttatatgtagtannnnngacata

SEQ ID NO: 10830 - DNA, 476 bp, Canis familiaris
  misc_feature (1)..(476): n = a or c or g or t
agctgaggtgacgttgggannagaggccacgtgagcaggatgaacccgctgtcctctgnnnnnnnaggcnnnnggggactgtcgtcagccggtgggtcgagggganntgagacaccgtgtccctgaaaggcaatacagggtcgcttcctcactcgccaaggtccccactgcacctgcgtttccnctgagctccgggtcccatggggccggttggtcccctcccaggctgcgggagcacagttgtcctggacagagccaaccctgaaggctcgagctgccccnngtnctgcttcctgagggtggtttactgctccccgcgacgccagctgggagactgcccctgcactgcctgtcccctgtgttccccttggagacagaggggagcctctgtggctcacgtcccctggggctgagggttctgctcaaccagcctgtttgagcactggacccannnnnccctgagtgtgaatctagct

SEQ ID NO: 10831 - DNA, 524 bp, Canis familiaris
  misc_feature (1)..(524): n = a or c or g or t
atcagnntcaggcanccactgccaggtcncagctgcnntgannagacagggggctgatnnnnnncnnnagccccccatgtaccagacttgacggctcctccgtctagctccctgtccctcagggcactgggaggagggacactggcagagagaggccaggagctcatcccctcatgcagacttgtgggacatggctgtagatccccaaggagctcactgtggcctggagactccccttctccctggctcagccctaaaggcagggacacttcctccttcttttccttcccaaagcaggaggcaaggctgctgtggaaatggtactgtacagccggctctgtcccctgtgcttccccgtagccctgagcaagcgggcctgccacccggacccccgagggcccctagagggagaggcgtctcacgggctggcccggaacacaggtctggcagcttgctcccctctccgtcctcggaaccggagggccagccaagggatggggggtggggggcagcgtccaccccca

SEQ ID NO: 10832 - DNA, 627 bp, Canis familiaris
  misc_feature (1)..(627): n = a or c or g or t
agctgatnatgtatnnnagttatgataaaagtaanngtaacntaaaatggcaagatatagttatgtaaaaaatacntgagctgccttattgaattaatgggtttcagcttctgttcacagaaagctttattttatcaacaaccctttatgtttaatttttatagaaaatcagcaatatagccaactataccaattaaaaattaatggatactcaattttgaatgaaaatacagtgtacttattttaactcagtaagcttttaccaattattcttagcccatttctccatttcactgagtagagaatactacttaatgcatttagttaaagcaaaataatttcctgcacattgatttcccttaacttttgaaggagtaccaccttacttttgatcctatttgttacattaatagcacacattcaaggttcactacaaaacaaatagcacgtggtaatgatttaagtgcagttacagaaataacatatatggagtaagataatttctgatcttgaagtaggctgccagtgattggcattacatacatacctatgtagtaccttccattattaattttgctgctggctacctttgggtcttaaatcacctgtatcagttacctttgtgta

SEQ ID NO: 10833 - DNA, 626 bp, Canis familiaris
  misc_feature (1)..(626): n = a or c or g or t
caaaaaaaaaaaaaagattttanngatatattttcgagaangagagtgtgtgcaggcangaggggaagccgaagaagagaatctccagcagactctgcactgagcgcagagcctgacacgtggctcagtcttacgacctgagatggtgacctgagccgcaaccaagagtccgatgcttcaccaacctgagcccctcaggtcccccttagttttatttttaaagaatccagcaaactatttcaaaggcaaaattgaatgcccaaccgaggttagaattgcaacatacatatgagagacaagtaataagttgtctgcaagaccacaagggccacaagaccacaaggggtgagaaagatccagagccccgtttaccctgaatctttcagaaatgtaaaattgtatcttttgacctttttttttaataacgctttttcccctgaatcctcttttgcctcttttggaacatttttattcctgcttcctctcccttcacgttcgccaaatatatctctttgccttatttttatttttaactttcttgggtcattttatttttaggtgtgtcttagaagcagaatatcttcggatttggaaaaaaaaattaatccgagcttgcccttctgagg

SEQ ID NO: 10834 - DNA, 312 bp, Canis familiaris
aaatctagcaattcacataaagaccctagaaatagattctagtcaccatcattacataatgacaaacctttttaaatgcttcaactttgtggcaaatgccactggagacattaagttgcactcatgtattataagtaccaaactatataaaaggaggtcttgtgcatttcaagtttgcaaggcacctgtgtacttaaaatatgtatggagactactgtacagtagctttgcccctttaattggggtacattagtcttaacgatatttacccacccaaccccagactgagatcttgctctagggggctctagg

SEQ ID NO: 10835 - DNA, 551 bp, Canis familiaris
  misc_feature (1)..(551): n = a or c or g or t
aatcgcagcccgannanggcagcaatgnnnacntggccagaaagtggtcactnctaccgtgnngcgaangagccagtagtgaatcccctcattttgtgcattcactttgaagaaaaagnggttnctcaaagatgcacactccctcttcatagngtcntgttcgtttttaagttagagaatagtccctcttgcattcgaacctccttcaaaactccttgcccaatgtgatgtttttcacttgcattgtcattagatgtccaggggaaaaaaaaaaaaagatgtcgaaacttttttttaaagaaaaaaaaaagaaagtaaaacacaaaacacaaaaacaaaaaaccacacacaaaaaacacaaaaacaaaatgaaacaaacaaaaattaccccagagcaagtactgtgtgaacatgtggaagtccatgccctaatagagttgcaattttttattcttcttctatagtggtggcttggtttgtgtgccttttttttttctgcatttgtattggaaaaggttnnntttaaggcatttttnnnnnagcagagagga

SEQ ID NO: 10836 - DNA, 529 bp, Canis familiaris
  misc_feature (1)..(529): n = a or c or g or t
cccccccaccaggaaagtcttgccctgtctgtccttgtctctctgcgtcgaggctgtccatgtctgtgttcgtttttcagtgtttgtttacgtgtgtgccatttatttacttactggtttatttatttattatttattggtcgatgagccgtgcagcacctactagtttacatgtttccccttgaagtgtcctgtgtctctgggaccaagctgcctttccaggtgtcctcctgtccccctgggggcatcaagaagcaatgggtgtggacacttgaatctcgcatgggtcaggggtgaactccaactctgtagacctggagggactgaggggacaggtgcagagcagcaggccagggttagtggggtggaggttttctgagcaggtgcagacccttctagcctgggcttagcatagcacccctaccttgcccagccaggcacgctcccaagaagggcatgaagcaagcttccttcttgtgggcatggtgtctcttctggatcctgcacnnnnntgagcacaagcgtgcca

SEQ ID NO: 10837 - DNA, 607 bp, Canis familiaris
  misc_feature (1)..(607): n = a or c or g or t
gctatngaattgaaagacaggaaggagtcaataataagatttgaggtctgtacagctgcagtatgtaccttctctactttgtcttcagctgtttattgcactaggtcattcctatagcatacatgctctaagaggggatgtcactattgacccaatgaatattataagaggcacaactacatacttgtaaattcaacagctcagatgaaacagaccactaccaaagctaccagaatgtatccaagaagaaacagataagctgaataatattgtaactattaaaaatttaatttatatttaaaaatctaggagcacctgtgtggctcagttagttaagcatccaactcttgatctcagttcaggtcttgatctcagggtcatgagttcaagccccttgtcagtctccatgctgggtatagagcctttaaaaaaaagaaaatctaaagaaagggtgaagtccaggcccatataacgtcactggtgaattttatcaaacatttaaagataaaatgatagttctacacagctctnctagtagaagaaagacttcccaactcattttatgaagcccaaattatctgagaccaaaaccagataaaaanaatat

SEQ ID NO: 10838 - DNA, 560 bp, Canis familiaris
  misc_feature (1)..(560): n = a or c or g or t
acaattatagnnctctgtgggtctganntagtttttcnnnnntccacctcatataacnngataatatatnnnttctaaaataaatattggttgatccagagtcaatgaggtggctactatccaagatatgnncttgnnnaaaagtgagtttgcatctcgcaaatacgtgcatatatgttcatgcatgcaatgtgtgtgtacttctatatttcttttataaacataatctnnatttcacataatataaaatataatatttataaaatacagttttatgttataaattctatgtgcacacacatttccaatactttagtcacatgcacatacttgcagccatagccttacagtcaaactcagcttctttatcagaatttttagcaaagggaaataaaatttcttgttattnnnngtttgtcccaggaagccttcccacccatgatatatgtagccacaatgttgctaagtatagaggccagtccttgttcctccaaaagatttgttgtgttttnnnnnngtnnnnnntacctcagctaagcactgctcaagcatttacaaat

SEQ ID NO: 10839 - DNA, 637 bp, Canis familiaris
  misc_feature (1)..(637): n = a or c or g or t
acttgagatnnaatgttcgttccttcttcagaaatgcttggtccttgcttcattcctgaagaacctgcatgnnntagnnnnnncanagtnnnacagtctctccatacaggctcggagtctgacttctctgattgatctgccctgtagctgtgtctagctgaggggcccaagtccaaggattgagagatggcactacaagactatatcctaatttaataattactgagcactgtcttgtctagttaagtcagagcctttccagcaagctctttggacacctgagatgtcagagtcaaattttcatgcagattcagcaaactctcaggtaaaaataagtcatagaataaccatcaaaaagcagagtctggtgtgatgcttcagtaacaacagtacattaacacacgttgagttgtcacaagatgtcatggctgtattgaggtgacaggaaataggctagtactacttacagaatggggtagtccttttctgtcaaaaatgaagtgccggtactaatatcttaaaaagcagcagaatgtttctcccagccctgtctgtgcctattacaagttttggcttatgtgcattatgtgctatatagttactaataacacaatgctctatctttatggagagatga

SEQ ID NO: 10840 - DNA, 516 bp, Canis familiaris
  misc_feature (1)..(516): n = a or c or g or t
acttcaggaatattcttctacactaagtgtcattacaatgtacagtgagctctagttccaagagatggtgaagtgctaatttaggtaccagtttcccatctctggctgcctttggaaagatggatacttaaatttaagtcccaaacttctgcagtgggttttatctggtgagtattcttttcataaaaaaggcatattggctacgaccatttccaaaggagatggactcttaactctgatttctgattgcaaatccaacaagttgagacacttaagcccagacaacaataacagacaaaggactttggttgtcaagtccccaaagtattatggaaagccccccatttgatggaaaagctaacttattaccctcatttgttctgtggtttgctgttaaccagggctatcccgttcaaaatgccacagacttagcctccaggcagatccaaaagccaagtagttacgctgggttgtttnnnnnngctaccacacatcttaagtaaatagtaaagcctt

SEQ ID NO: 10841 - DNA, 230 bp, Canis familiaris
  misc_feature (1)..(230): n = a or c or g or t
catgatgagaaattgnanttgaatgatagtnnnnnnnnngatattcatgttattactnnagcactcnnaatgnnttttcgagaattaccagaacctctttttacatnnnnnnattttaatgattttgnnaatgcaatnnnnnaagaaccaagacagcgannngctgctgnnaaggatctaatcagacannnnccaaagnnnnatcaagatacaatgcagattctttttag

SEQ ID NO: 10842 - DNA, 425 bp, Canis familiaris
gtcattcaagagcatccagaatttcaacatttaccagcccatctttttctccgaccctgccctccaacctctctgagtccaatgccttccagcagatacacatccacgcaccgctagggatggttaaagaatacgaaaattcggacgcgctccaaaaagcctttgcaaaagtcatccacagcactcaacagtgaatttagaaaccccaatttttttctgagtttgaagtttttaagccttgcggatggttggagtaggaaaaaggaaatttactaggcagtgcagaggaaatcttgttgtcctctattgtggcagtgggggtgttgcccaatcctgacttatctgccttgataaaggaaaccaaagaaaagagtaacaagcacaagattttgtcaaacgaaaaggaacccttttcttaccttaat

SEQ ID NO: 10843 - DNA, 376 bp, Canis familiaris
  misc_feature (1)..(376): n = a or c or g or t
atagttcaaagtctttttcttttnnnctctctttnnnnngtnatttttaaatannnctatgttttagaactgacaggggggcagccctggtggtgcagcggtttagcgctgcctccggcccagggtgtgatcctggagacctggggtcgagtcctgcattgggctcctgcatggagnnnncttctccctcctcctnnntctctgcctctctctctatcataaataaaaaaataaatctttaaaaaaaaaaaaaaaagaactgacagggtcttaaattacatgaaatgccatagtttccttcctggaaaatttatttcacagtaaaaccttgcaaacatattttctttttacaggtaaaatgatgttaaattccagg

SEQ ID NO: 10844 - DNA, 564 bp, Canis familiaris
  misc_feature (1)..(564): n = a or c or g or t
attgacatttnnnntttgtattgggnnnagattttgtgacaacactaantggtcacagaaggtnnatacatttcagacagttgggctcaaaatcagttcaaaataaagcgtgaagtgcttaggttatatatggataagaacagaggtgaaaatcatagcaatgaatgaaaatattgctcttaggtcagccctcgataaaaatctgaggagtgctgtgaccacggctttcctcatgctccccgaaagcttttctgaagaagacctctttatagagattgccggactctcttattcagatagataaaagcccagaaggacaattcactctctaatgacattgcccaaaaccttacagcgacaaataaatcatattatggaccctcctggaaaaaacagagatgtggaagaaactttattacaagttgctcatgatcccgactgtggagaagtggtgagactagggctttcagcaattgtgagaccttctagtatgaaacagagcaccaaaggcattttcactgctggcatgaagaaatcagtggtttatagttcactaaaactaca

SEQ ID NO: 10845 - DNA, 569 bp, Canis familiaris
  misc_feature (1)..(569): n = a or c or g or t
agaggttaagtaacttgcccaaagtnatacaacagagccagaaactgaagccaggattattcanncacaaacgcagaggaaattgggtagttctgcagatngaaatttgagctgtgggattataactattgaaaaggttttcttttaagctgaagtgtaccagagccaattttcagctctgatgataaggacttcaaactataggtgcctacgtgagactctttttggttcccctagaattgttgtctttttgccctaattaaatgggacgcagactacaaacattcctgggcactcaccacataatcaccccaacccttaatatctaaaatactagtgactagaaggaggaacttctcagtgatggtataattttcactgataaatgttacagcagatgtcagtttgttctcttcaattcctgctgatggttttagctggcataaaaatatctatttagacttaaaaccttacaagttgtattatgatacagtttattgacttgtacagtattgtcctcacaacccattcaggtgtgcatgaatgaatctgaagcataccccatttaa

SEQ ID NO: 10846 - DNA, 317 bp, Canis familiaris
  misc_feature (1)..(317): n = a or c or g or t
attcgctccnnnnnnctctactnntnnncnannnnntcccnngnntcgacctctccctgtaggtccccttgctccaccacttgatggtgttggcagcttctnnggcttaaagaatgaaagacgggctgatgggctgactaggnnnctgaccnngnnnnncagtcnnnnnnnnntagcaaatnnggctccaagnngnnnnncaagaaaggcgctgaaannnnnntcccagatgaccgcaggccccagaagtctgggccagcgagcccgtgtggggtgtgggcagtaaagcttgcacgagtgaaaattaactgtgcggg

SEQ ID NO: 10847 - DNA, 654 bp, Canis familiaris
  misc_feature (1)..(654): n = a or c or g or t
agtttgtgttangcatgtgttttcattcatataaactgtttaaaatttttcagntnnnntagtttcatccctcttactggtnngtctgtaataaatggtnacaaagaagggttatattttacccttaaactaaatgcatttttgtattttcagagcaggtttaaacgttttttcctatagctgaactgttgtcctcttggaaatccttcccccaacctttgtagcaccatctactggcagaatggcagtatctctgcaaaaaccatttgttttaaaaacttgtttaggataattgcatcagatttagaaattttgccatcaaagatctgtgcagactttggttacacgtttacttgtaacgaagatgggctttatgggaatgtagttaacagtccatatcacaattgccctttctacacaagatttgaaaatgtaaactgctacgcatagcttgggcagtggcccgaaattgctatgacaactaatgaaccagctacgtgtactggtatcttaggtgcaagttgtaaagcaaagtatttgtgtattctgcttggttaacaaatgtatatttgtagccctttcatgcaatagaattcaagttgttgtttataaaaaaaaacaaaacaaaacaatgatataggagaaaattgcctt

SEQ ID NO: 10848 - DNA, 585 bp, Canis familiaris
  misc_feature (1)..(585): n = a or c or g or t
tgaatnnatcatcttggcttgtgatggnatctgggatgttatgagtaatgannngctctgtgaatttgttaaatctaggcttgaggtatctgatgacctggaaaatgtgtgcaattgggtagtngacacttgtttacataagggaagtcgagataacatgagtattgttctagtttgcttttcaaatgctcccaaggtctcagatgaagcagtgagaaaagattcagagctggataagcacttggaatcacgggttgaagaaattatggagaagtctggtgaggaaggaatgcctgatcttgcccatgtcatgcgcatcttgtctgcagaaaatatcccaaatttacctcctgggggaggccttgctggcaagcgcaatgttattgaagctgtttatagtaggctgaatccacatagagaaaatgatgggtttgaaccttcagttgtatacttagacaatcttttcacattctgaatggcagtctcgggcatgtccatttgtaaagccgccgagggctctggtgacaagaagggcagtggctgcagaccttccaagccnnnaaaagtacaaggacatgaaggttt

SEQ ID NO: 10849 - DNA, 663 bp, Canis familiaris
  misc_feature (1)..(663): n = a or c or g or t
ttccctgnntccgagagagatcaaaagccaagtctgtggtgctctcaaactcactttgtaaggtnnngcttcaacaagtttggggctgagagtacttggaactcttggctccctagcacaaaggaatgacctgaaaaggacactcagtaagtcctcatcctcgggcatcaccaggctaatggcacatcttacccactctgtctccataaaggagctcactcaggggccacagtctctgcttgttcgacattccagcatggcatgaaaggtagaacctgtgaagtttcttgtggcaagaactcacgtctccctcaaagtttccagatgtgaaagtcttgagcgtggccatcaatctttccccacctgcagccagagaagtcacataccttttatgtgtaacagcttccaattcaaagatgttgaactcccaactttcctcattatcaagtaattgagcgatacaaggggggacatcgttgatggttattggcatcgcaaggtgactgtgactctggtgcacatctgagcaaacagatggggttggggaggctggttaattgtggaatcttgagtgcccctgagcatttgtcatcatctcatggttgccaatataaagggagtctnnaacttccaagggtaggaagatttttcacttctgagttc

SEQ ID NO: 10850 - DNA, 110 bp, Canis familiaris
gaaacaccaatacatttttttttgttactactacctgtattttaataagaaaacagttggtttttttccccagtagtaccagattaatgatggatcatccttcagttgtt

SEQ ID NO: 10851 - DNA, 511 bp, Canis familiaris
  misc_feature (1)..(511): n = a or c or g or t
gtgtaccaggtgcatannnnnnncaaactagctgcagaactgaacagatatatgctggaaaaaatggctgannacacaagcagtattctgcgctccccgatgcctggcgtggtggtggccatctctgtcaagcctggagacatggtagcagaaggtcaggaaatttgtgtgattgaagccatgaaaatgcagaacagtatgacagctgggaaaactggcaaggtgaaatcagtgcattgtaaagctggagacacagttggagaaggagatctgctcgtggaactggaatgaagtatttatagcctttcagtcatcacccaatttaattagccatttgtattattattatttcacactcaatttattcaagcgttttgcaggaacactcctgtgcagcagattttacatggtcatatttattccacatatagtcaaaaccaacattctgccaaaaaatcaccaatggaaatttttattgatataaatacttgtacatatgatttgtacttct

SEQ ID NO: 10852 - DNA, 676 bp, Canis familiaris
  misc_feature (1)..(676): n = a or c or g or t
tctaatcatggattcattnnnntangagattaagttgagcatattnatacttnacaattgantnnntcagaggattaaatgacaatcacatgtaannnnnnngnnnnntgatgnnnncgtgtgagnctcngntatnaataaatgattgccgttggcatgnnagatcacgtaagaggttaaatggtggggatctgaaatcaaactctctgatcntggatcttgacaagatcacctatgaggtatgtgatcttggaataggtaatggtgactgtttttcatctgacattggagagagttatatcttcttaatggttattgtaattaaatgacatatgtgaaatcagttaataaagagcctggtttatagtgagtgctgaataaatctttagcaattgttatattcccatgtaggtgttgaaaaacagtagatattcactaaagaaaaaaaattactagatgagttaaatattgaagccttctagataatgcattttatttcactatgactaagcttgaaccttttttcttccttttcttagatcccaaatttgaagtcttggacaaaccccagtcctgaagaaataatgtaaaatttatttggcaatttgtcctagattagttgtacaactggatcagaataaacatgtttcacaactgtcaaatgtccagagaactg

SEQ ID NO: 10853 - DNA, 496 bp, Canis familiaris
  misc_feature (1)..(496): n = a or c or g or t
gaaaaatcttccaataagnctgatggaaaatacaaggggaggattagtgcctcaaattatgaaactatctagattaaccaatagcaaacatctttcaacgaatcctttcttttagccaaagggaggtttatatctcaggtacaacagacaactcaaaatggctacatgaaatcaagaactgtttggaaagagaaaagaaaaaagagaaaaaggaatttattgtaagaaccctgaactgatgtctgatgattctgggaacagcccttgagatgtcaaagatgataatacagtaacagcatttgggaagtatttctagtcttacacttagccttttggcaggaatttattaagacagaataagcctgtgacttttcaattccgagtacaatttgtttctctaatacatccgcaggagtaatgtgtgatggaatatttccttctgcagcccctccactgtgggtgatgatatgctataataggttctcacaggccatat

SEQ ID NO: 10854 - DNA, 428 bp, Canis familiaris
  misc_feature (1)..(428): n = a or c or g or t
agtgtcccaccagtggtagagaaagcatgcgcctgaccctgncgtgtcgtgcnnggtacccgttcttatccnagtggttcaggaagagaaaatgcagagtttgcactttcaagacagcttctgtaaggctggcatgttatctccttgctttgctttgtgccgttttaaaacgtgtaattgttacagcattccaatggtcttgnnnnnnncaggggactgtaaccaaaaataaaaccgtatttgtgtcattgatttgaagaagtcttgaatagctccttagtgtctnnnttggggttgataaggtttgagtgtttgcagttttttactaaatgtagctccaaagttgtaaaatggcttgtttgttcctaaacctgttaatcaatgaaaccgtatgtaagtttacaacgtattaacttattttttgctta

SEQ ID NO: 10855 - DNA, 374 bp, Canis familiaris
  misc_feature (1)..(374): n = a or c or g or t
aggtggccnnngctggcctgtcatcagggaatgcttgtcatanggcaacgtgggctggtgggtgggcnnnnnnccctcnnnggggtgngnggnnnnnnnncatttccagaacaaaggagtagggtggggcctgggagacacgtgggaaggnnngatgggaggaagatagagaaagagggaggcggtggtcagccaggcagggccactgtggaagaggacatacatcccccacctgttgtgtccataacacacccgcagctacatgccnnnggcccctcccaatgccacacccgcacctcactcttcattgtgtttcctccgccgcgggaccctgcatgtcnagtgtcccggacccannnnnnntggggctagtg

SEQ ID NO: 10856 - DNA, 322 bp, Canis familiaris
  misc_feature (1)..(322): n = a or c or g or t
gnnaagcagctttctctgtggtctccnnnctgaggcgtggggacggggagcctctgtgtggctcggnaggcccacnntgggggccacttccttccccgatgaccgagggagagccaagacggaagcagnnnnnnnagaccttggtgacaagacccacgccgagctgagggagaggcctggacccgagagagacgggcccggccagctgggctgactggggagaagatgctctgcaccccactctgcaagcgtggaccaggcccagcccccagggcccctgcggctccgagggcctcnnnnnngaggcagacaggctgcccac

SEQ ID NO: 10857 - DNA, 611 bp, Canis familiaris
  misc_feature (1)..(611): n = a or c or g or t
tcattttcacctttgaantagttttccactgaaatatgaagcattacannnnctgcnnnaagatgtgcnnggtannggtgcttaaattcnnnnnagagattctcacttgtatttgaagaaggtgggaatgaacacagatggtnngaaagaatgttccagagaaaggtcaaatcacatatccaagactcagccacacttgccagggttcctcaacaccagagaaataggaccctggagcatctctcctttggagcatctgaggggatagcatctgaggggatggcaaagccacctacatgtgtatcaaggagaacaacagaggaacttccctctggtttctaaggctgctcttctattcctggtcggaggaaggacgacccgccattagccaagtcagccaggcaatacccctggacatagaagacttcatgaaagtgatgttttccattcaggccaaaacaacagttgccccttcatagtcatactcaccagaaagactacgggaggcccaccaatcagagccatggctgtcgagagcttgcgcttattgcctccactatagttaccagcatatttttctccatactttacgaggcccagtttccgaattg

SEQ ID NO: 10858 - DNA, 530 bp, Canis familiaris
  misc_feature (1)..(530): n = a or c or g or t
acagagagaggtggtnngcagctgtgtcgannnagactttagtaatattttgttttcnnntacttancttctatctnnngncgaacttccaggctttccagttaagaaagtgatagaagccttcccttaaaaagatacacttaaataaaacatgtataatggtcttagaaaaatagtaactaatatcataggttgactgcagagacagtagaaattgtggagggagttcatcttgggaagtagctgaagggactggaaaggggcacagctagattattcgccggaggtgacaaagccatccatgtcctgcctgctctgtggacattccaggggctggctgtggcctggtaacccctccagagggtcctcaggcaggacatggagaggagtcttgatcccggccaagaatgtgcagagaagtcccagccacaggttagcagaggtctttaggcctttatctgtgggacatttgggggagaaataaacaacaannnnacaaaaagcctccancntcctgcattagcaggcat

SEQ ID NO: 10859 - DNA, 416 bp, Canis familiaris
  misc_feature (1)..(416): n = a or c or g or t
cggcccggctgccaggagatggagtactcggtgagcaccgagcagatgctcatcttcttcctagtcgtctggttcttctacttcttctaccttcaggacttcntnngagtggcccttccacccactgctcccggggctggcgggccacagccctgagtgagctggcccagtcccccagctgggccacagagtggccaaggactgaggccttagccccgcagggaggacggccgggatgccaggtcgcnctgcatctcggggatggagatttggggctcagcaccctgctctcggagggcccagggctgcgcaccccaaatgggcttggtgttgagcacacgacggaggaaaggggaagacgtgtgccccacgggacctgcagcgggcgagggnnnnncaggccacatcaaggctcc

SEQ ID NO: 10860 - DNA, 590 bp, Canis familiaris
  misc_feature (1)..(590): n = a or c or g or t
ggatccnncagcctgcccagtcggccccaaagacagcaggggtgagccagacacanntgagcccatgcaggtagaagaggtgggcgaatgcttcttccccttgtccaacacggctgtctcgtcggatcctgagaacttcctgtgggagaaggaggcggtcccatccaatcccgtccggtcctggctgaaacaggagagcagccgagctgcacccccgagtcccttctccccggatgcctccagcccgcttctgcccatgcctgcggagttcttccaccctgctgtgtctgccagccagaaagggcaggacaagggtgctggcgctgggactctccccaagatcgccctgcagggctcctgggcatccctgcggtcgccgagtgtcaactgcaccctcctccggcaggccacagggagcgacacgtcgctggaggccagccgcagcagctcggccggcagcctgcagaccacgctggaggacagcctgacccnnnnnnacagcccccggcgcgccctggggccgcccgccgccgccgcccccccgggcccccgcgccggcccgtcgccagccgcccgccgccccagcctgc

SEQ ID NO: 10861 - DNA, 515 bp, Canis familiaris
  misc_feature (1)..(515): n = a or c or g or t
tttgttatgtaaatttngnnnagaaaattttttgncataaaaagtttattttnnttcaannnnnntctgtgcatgcactaataaactggttgtttaatttaaaagaaatatgtaagactttacccatgttattttcttgggttttattttacatgtagaaatttttttttttgggtaaattcatttttcagggattgaacactattgttagcaagtgcctaaaagatgtgaaacagtttacatatgtcaactgtaacagtaggtcccaaatgggcccagtcccccaaaagttttattttaaagaaagccatacatagatgcttcaagctatcttgctatgcacattatacatgtactttttttgtgcagtttgtctactttactagtgaagtattttttgtataannnnnngttacnnnnnntgtttcttaaattgagcctaagaatggagttgattggaaatatatagtatatnnnnnnnatgtatatggtgtttaaagaatggtaagcattgt

SEQ ID NO: 10862 - DNA, 567 bp, Canis familiaris
  misc_feature (1)..(567): n = a or c or g or t
tccgctgtggncagagggtcatgcaggctgctgtctgttgtgttctctgcgtcctactcgcgtgttcgtgtgtcagacgggggctgccacctgccatggaagtccagtcaccatccctgacggagcacaacctgcaccctttggtttacagtttttttcctgttcagtgagatgtgtctccgtcagcattgtttggtgagtggtgggactgttggggattccaagtccttcctgttgctcaacgctccacagggttggttccacgtcgtgcccgcagctgccgggaaggctcactcctggggtggtcccggcccctggaatgcaccccacggagggggcatggggaccccaggccacgcccatgagatgcacttcctcagaggtgatggtcttcaacgacgttatgacttccttctgacgaacactgtcactttagcatgtagagtaatctattacagaatcctgtgcggtgattctagaacctcaaaattgtatgatgtgttatataagaattgatttgctatcgacattcccagataaaggagagagacatatcacgctgctgta

SEQ ID NO: 10863 - DNA, 527 bp, Canis familiaris
  misc_feature (1)..(527): n = a or c or g or t
gctgctgcaggaagtanngcaccatggcactgcgcacgtcttcttccgggatcccgctagggcgcctgtgaagtcacatgggccagtggaggggttgggggggacgtgtgtgggtgatactccagtggtcttcccacctgcagtctcacattgtatgggtttccacggcccctgctctgctgatacactaacctgtgaagccttaacttgggcgcccaggaacccctctccctgtcctcttgctccatgtctgaacccatcacagccacatgcacccccaagtctaacacttcagggcaggaggcgaccttccagctgctgcctcatcctggggaccagtgagctgtagcgtggggtgggactggatgagtgggggacctgcagaggccccagcaagtgggaaggtgggcagatgaagaggcaagagtatgggggttctgaatgctgtgtgaggggatgggttggttctgatgggcagtgaggtggaacctgccagaggttctttaaaatactctttttctgttata

SEQ ID NO: 10864 - DNA, 508 bp, Canis familiaris
  misc_feature (1)..(508): n = a or c or g or t
tacagctgtacaannagggcctgcagggcagcntcaccagcctcaagaatccnttaaccatgatggccaatcactataagcagcactgtccccctaccccggaatctccctgtgcaacccagaatattaacttcaaaagtttcaaagagaacctgaaggattttctgtttaacatcccctttgactgctggaaaccagtcaagaagtgaggcagaccagtccagccaggagccagcccagtccagccagaagccagccctgagagcatacctcatacctcacaagtcactgcctttctacccatggattgctgaaactcaggatcttcacctttgagggaccaccgggtggaccagggcagtagagggggcatggacttgctctgggccatgctgcccggataccagcttggtatggggagcggggaatgttttatactggcagggatcagtaatatttatttatatatttatgtattttaatatttatttnnnnntttatttaagat

SEQ ID NO: 10865 - DNA, 629 bp, Canis familiaris
  misc_feature (1)..(629): n = a or c or g or t
ttttcctatcagagcagacagcctttnnagaacattctaataatattatnnngcatttctctatatnnntcntcatttttgtatcaaaaactttctcatcatgtactctagtgagaagttctgtgtttttactggtgaaacattttcaacaatcaccacagagagatacaaaattttactctctatgccttataatttttttgtcctctaatatgattatcacgcacaccaaaactgagagtcctctttgttgactgttttagagcaaatatttttaccattctgctcctgtatgttctagaaaacatatgattacagatatctttccattgttttttaatatcagtgaatggctagtaattactcttttatccaaaatagaatttacccctaatgccaatgatgttgaatcttttaacagtagctcttgtggaaaataccagtctttaataatcaaaaactgaactgtaaacattttccctagaatgtttcccacttgatatcacttgaactctgagggtcaactcctttcatatgattttttcctgtacatttgatgtttcttacattgtcccattctttgctgatgcattcatctctaacataaaatgagggatttagccaccatg

SEQ ID NO: 10866 - DNA, 566 bp, Canis familiaris
  misc_feature (1)..(566): n = a or c or g or t
aggtgtgcntggtcatgctgtggtnnatcatcgtcccagggcantggagatttctgcatttacagagagtgatagagaagatcttcttcctcattttgcgcaatatggtgaaattgaagattgtcagattgatgactcttcacttcatgcagtaattacattcaagacaagagcagaagctgaagcagctgcagttcatggagctcgtttcaaagggcaggatctaaaactggcatggaataaaccaataactaatatttcagctgttgaaacagaagaagttgaacctgatgaagaggaatttcaggaagagtctttggtggatgactcattacttcaagatgatgatgaagaagaagaggacaatgaatctcgttcttggagaagatgatttgactgatcattgatctgcatatgctagaactctacctgtgtttcattagtattatctaatgtacttttacatatttgtaaaaacaattttttggtaaaatgtgatgaagatggatttcacaaatagacaaaagagaagaaaactaccttctgatcctgtattttgaaagatt

SEQ ID NO: 10867 - DNA, 661 bp, Canis familiaris
  misc_feature (1)..(661): n = a or c or g or t
agtaggggaagaantngacatannagtactgaagaagtnnaaggaacccagnngnnnnaggcntagcttcaattttagatgcctggtgatcagagcctcctgtaggacattttctctttttgcattcttgatgtacctaggagttttgttaaacagatctgcttgtgagtatttatccttcgttttatgcaattaatcaaatcaaccaaaaaagtgaccatgaaatcccatatttgactttttactacatgtatgaactcttctgatgtgaatgagtactgtagtaatccgttttaaggtagccttattttagaaacatttcaaactggtgcacacagaaaagactctgtcttttcctttaaggctaaaagacaagaatgtcatgctctacaggtgcaactcaatccctgttaataaaaccttgtagatacagacatttgattcttttaagtagctgtgtcccaacctgttgccattgacttttttagaaatggctgtagaaatttccaagttatccttgaattgtctaaccatggacatcagcagttgtctcccttctaccatgtagaatattttgacttaattttcttccagatatagggggatacctgcctgttttttttcannnnnntttatttactgctgttactatttgattaga

SEQ ID NO: 10868 - DNA, 404 bp, Canis familiaris
  misc_feature (1)..(404): n = a or c or g or t
ctgtggggcttgtgtcagagactnngttttgtttccctnnncatnnnnntcngaancaatggnnnnngaagggtggnnggataattannnctttgtaatattaannnnagttagtctttcctatccactctttccctggagtnnctggttccccctaaaactnnnnntgaaatttgnnnnnnttcttnntnnnnantgcatagtactttgctcctaggttttggtgtgtaataagatgttccctcagccccaaagccttccctgcattgatattnnnggctctcttgtctacttttgtatacacccnnagtttttanntggctttcctgnnnnnatagttttgnnnaatgttatctttgtgggagggagggtgggagnnngttaannnnngntggggaccaggt

SEQ ID NO: 10869 - DNA, 690 bp, Canis familiaris
  misc_feature (1)..(690): n = a or c or g or t
attaatgatgagagatgtcacttccccaannaaggtgggtcnctggtgtgctggatggctaaacagctctgtgtaaaagggacatagaatagtagaggcccttttggaatgtgtcccatggattcaactatgggagtaggtaatgttcaaaatgacaccaaaggttttatagtctgatattaatttctgattatgatctgttagaaatgcaattgaaaaatcagattttaaatttctttagcagtcaaattaagccaggaaaatgtaattaggaatactgttcaataaatatgcttattaaataacttagagatgtctcttccttgcaaaggaaagtcaacttgctcttaagcttatttgctcaaagtatgccttcccacaaatttaaaagataccatgtgttccataagctatgctacagttaaaaatttttttttgaaacatttagcttagagaaggtagataaacagaatatgtgtgctggctttaatgaacaactaacagtgcactcactggtggaacacttaaagcttagtaagatgtttaaaaatactatagcagctaagtattgaagtcatcaagactactgatgctgacaaaatattgtcatcaatattttttcctactgatagaaggtactgctgaagataaaaaaaaaaaaatagctatgcaatcaacggatgtcaagtt

SEQ ID NO: 10870 - DNA, 438 bp, Canis familiaris
  misc_feature (1)..(438): n = a or c or g or t
agctcagcgagtacctgcctgtgctgccgccaaagggctcctcctccgctgggcnntcggtgctcgagggagagcactcctcagaaagctctagatcagaggtcctgactttaggcagccctggaacctcagtcgatggtataaaatacagatgcccagccccggctctggagaatcggattcaggagtctgcatttttaccaagtaccaccactgcctcgaccaccaggaccctgctgcaggtagcagaaacacacctttgagacacatggttctagatgatcctcagaatggctgaaaactaacctaatttcagatttcaaaagtgtgtaagnnnaagattccctccttaagcttgaatgctcctgnnnnntcagccaagagtgtataggtatccttctgaaaataggagaaagtgccacttgccaataaaacgac

SEQ ID NO: 10871 - DNA, 487 bp, Canis familiaris
  misc_feature (1)..(487): n = a or c or g or t
taanncattgaaagtttngagttgctcnnnaantcangtctttcannacacagagnnntggtgtattcccatgttcttctggagaaaataatccaaatcccaagaaacaaaccaaccttcttagtagaagggactaccacataatttcttttaggaaatatcacgtagtgtttaaaggaggtttaaaggcccaaacatctatattctgttatccaatctattgattgtgttcattagttattaactctgtcatgctgtcttgcctccaggcttttgtgttaactactcccacctcaaacactttttggtttctctgggactcctttaccccctttctcaagagactagattagatatcctttatctgtgctacactattctgttactgtctatacttcaggccttgcttttcatcaaatgtcatctccttgaggacagagatttttaacatgttcatgattatatctttgctacctggcatgaaaac

SEQ ID NO: 10872 - DNA, 511 bp, Canis familiaris
  misc_feature (1)..(511): n = a or c or g or t
tccatccagtaaatnncttattcttccatgaaataggntgggctggntgtacatatcgtttganctaaaaactcgatccctgggtgtgtacgctacagaaacgtgtctatgtgttcaccaaaagaaaagtactagaatgttcatagaagcactattcggaaaaacccaaagccagaaagcactcccatgcacacattgaatggataaacagattctggtatattcacacagtgaaatcctgtgcagcagtgggaacaaatgatctcagcacagtgggagtctcacgacatacagcaagttcacactacgtgattccatttatgtcaagcgcaaaacccagcaaagctaatctgtgctgttgcaagtagggactattagttactcttcagaggataggaaccagaggggggacaagggnngcttctagaatgttctgtgtgtggatccggctgctannnnnnctgagtgtgtccagtttgtgaaaattcttcaagctgtatacttttgatta

SEQ ID NO: 10873 - DNA, 498 bp, Canis familiaris
  misc_feature (1)..(498): n = a or c or g or t
ctatcgtcagtaatnnatatggggttaggtnanaatgtatatatttnngtacgtcgctctatttttcactagggccaagggacnnggtggctgaagcaaccctgtgcccactgtcacccgtgtgaggggnnagcagggactgcagagctggcctccctccccagacatgtgaccagggggccagggcagtggtggctgctgcttgcatccnnnnnnggcctgaggcaggtgctgggaggggaggctggttgggagggtacagccacctccgaggcagttcctgtcgccccccagcagcaagatggcagagcccagacctgctggtgccaggtgtgggcaatgagcaggaggaggacagggcaagaactccagggtggtcaggtggaaagagccctccccgggggctggctcccggggctggggagggtgagcagggggccgcgggtggcccaaccgacagcctggtaccacgtannnnnnnatggccacagttacagc

SEQ ID NO: 10874 - DNA, 468 bp, Canis familiaris
  misc_feature (1)..(468): n = a or c or g or t
ctggcaatgagaagaacaagggcnnngagagnngagttccagtccctgcactgtgaaaccaggtgctgcataanctgaagcctgtgacagctttctctctgaacttctgctcccttgcccctagaataagggtagcaacaactgccctgcccaccattcatgggtcagaaccaataatagtgtctttcttctgccatttccaggcagttgccagactttgctggatggactcactacagagtaaagctaaatcatccctgcccggaagtctccccacattaacctcatcatgccaacagataatctggctttcaatctaaccaggatgactgaagccacctatcagggcctcccaccctttcttggcacacttgcaccaatcctttgctctggaccaagctgggccctcattacacatagataaataagatggtgtctgtgctcaannnactcaatgtttgatttaga

SEQ ID NO: 10875 - DNA, 574 bp, Canis familiaris
  misc_feature (1)..(574): n = a or c or g or t
gagnnaggatggtgatgccagctccagtgaannngagatgcgggtcatnnatgaggacatcatggtagaatcaggtgatgactcatgggacctgatcacatgctactgccgaaagccctttgcagggcggcccatgattgagtgcagcctgtgtgggacgtggatccacctctcctgtgctaagatcaagaagaccaacgtccctgacttcttttactgccagaaatgcaaggaactgcggccagaggcccggcggttagggggtactcccaagtctggagagccctgacatcgccgtgcctaggctgggacttccatgtgacagcatgacttgggagctgagcctccgggtcttcggcccgtccccctggagcttgggtattgtcccactgggaggcaggaattcccactggaggctggtttggaaaggagtgtctcacgttccaaccntatctttccttcccgccttgtggacttgaatatggacctnnncagttgggggtgagaggctggtccctagacacataatttctgttccttagacctgccacccttcgctttctgggccagggtt

SEQ ID NO: 10876 - DNA, 572 bp, Canis familiaris
  misc_feature (1)..(572): n = a or c or g or t
tatcacagttcattctctnntttccctctgaaatgcnntttgttttcattatgttcttcctctataccatacattccttagggtgcaagttgggtcccatcccactagaaggaaaacctgcatataggccagtgnnnctagagtaagaaactccagactgagtatgagttttcattgcaatcgtgttctaactttctgtgtaactttggaccatattacgcccggtttccacatcataaaaggagacttggctcggctgagaactcattccactggacttcaatgaactttggcttcttaataaactgtgaatattctgcaggtgtggctattcctgaacttagaggttcaagctggcagttgcctgacatggttgggcctgtatgaggatacaagtgtttggtgaaaatgctctgaagattgagggtcacagtgactgaagcaacccagaatctcaggccagtctccatttcagggacaattgtgtcttttttagttaacgtgacttctcaagtatatatgtatgtgatttaatttttaaacctgttgattttgtatttgatgtgtaactt

SEQ ID NO: 10877 - DNA, 524 bp, Canis familiaris
  misc_feature (1)..(524): n = a or c or g or t
cctagtaanngagtttcgtgccccaccagcgggtgtgannnagtgtggcacacactgacggaaggagctacaggagctttccttnnncctgggctgtgcgccaaggcaggagccaaggaaggagccccgggaaacaagctctccttaaccagcatcagacgcgggaggcagcacctgctccctcaagcagggcgggacgcaggctgctgggtgccgtgtccacacccaggcctcctcaggcgtccagggctgggggggctgtgtggacagggcttcgctggggtagcctgggcccatccggggcatgccgtccaaagccagctggcctccttgcacacaccaagtccatagctgcacgaacggtgcctgcggtctgcgttgtcctggtttgtctccctcccagacggcactgtatgaaagtgacactttcctgttgccccccggccaacctgcatgggcgatcctggtttccttctatcgagtactaagtgtagttacacagataggacctcagttgagtttgg

SEQ ID NO: 10878 - DNA, 570 bp, Canis familiaris
  misc_feature (1)..(570): n = a or c or g or t
ccccaaaatngcagtctnnactcctgcagagttattgtaagagaagctacagagagtaatttgcctctatttttctaataacattttatattaaagtcaagatgtgctaaagcagatcatgaggtatcatgcttacctttatttattgaaacacattcacactcccaggaattaactttgacccatttgtcatctcctctcaccaggcccctgtgaaaatagccgtaattttcaagcagcttagagttctcattgattctgttttaagaaaaaagcttgaaaatcctaagatgtcccttgaaaatgacaagattctgcagatcattacagaactgataaaaacagagaatcataattgaaacttcacatcatgctcaactgctttcaaaattaagatgaagatatggatacacacacaaaaaaagatgaagatatggtcatgaaattatgtgaaaatggaccatcactcaagtatttcaatacttaaatgttggtatactagccctaacttaaaggtggtggaaaaagcacatactttaaaaatgtgtaattttctagttcctttttaat

SEQ ID NO: 10879 - DNA, 420 bp, Canis familiaris
  misc_feature (1)..(420): n = a or c or g or t
gggnagtgacncntgacatgcaaactngacacactnnntggagattctgtgttgttataaaatatgagctcaaactgagatctaaatgctctcggnnagccattggggnctgagatactggcaggggcattccagggccctggggagcagatacaagaagaaggtctgtgggccatggcccacactaagtcacaaagcaagtgtggccaggataacttgggctcctgctgacaaacatcccctgggcctgggggacagatggacagatgnnnnnncctcaggggccggatcagcatggcaaccttcttgagagagtaagccccaccacgaaactcggcccagtagacgccgtcctgatagcggctgcggtaatggccaccacgatgccacatgccgttgaggttggagtgggcacaggcg

SEQ ID NO: 10880 - DNA, 573 bp, Canis familiaris
  misc_feature (1)..(573): n = a or c or g or t
attaccantgtnacggtgccaaccccgatttaccaaactagcagcgggcagtacattgccattacccagggaggagcaatacaactggctaacaatggtaccgatggggtacagggcctgcaaacattaaccatgaccaatgcagctgccactcagccgggtactaccattctacagtatgcacagaccactgatggacagcagatcttagtgcccagcaaccaagtcgttgttcaagctgcctccggagatgtacagacgtaccagattcgcacagcacccactagcaccattgcccctggagttgttatggcatcctccccagcacttcctacacagcctgctgaagaagcagcacgaaagagagaggttcgcctaatgaaaaaccgggaagcagcacgagagtgtcgtagaaagaagaaagaatatgtgaaatgtttagaaaacagagtggcagtgcttgaaaaccaaaataagacactcattgaggagctaaaagcacttaaggacctttactgccacaaatcagattaatttgggatttaaatttcacctgttacggtggaaaaggac

SEQ ID NO: 10881 - DNA, 635 bp, Canis familiaris
  misc_feature (1)..(635): n = a or c or g or t
ctttcctggccccagctctcttacatcgcagaggatgagaacgggaagattgtgnggtacgtgctggccaaaatgnangaggacccggatgatgtgccccatnnacatatcacctccctggctgtaaagcgttcccaccggcgnnttggcctggctcagaagctgatggaccaggcctcccgagccatgatcgagaacttcaatgccaaatacgtctccctgcatgtcaggaagagtaaccgggccgccctgcacctctattccaacaccctcaactttcagatcagcgaagtggagcccaagtactacgccgatggggaagacgcgtacgcaatgaagcgggacctcacccagatggctgacgagctgcgaaggcatctggagctgaaggacaaaggcagacacgtggtgctgggcgccatcgagaacaaggtggagggcaggggcagctcgcttccgagctctggagacgcctgtcgtgacgagagaggcctggctgctgacgatagcgggggcgacagcaaggatctcagcgaggtcagcgagaccacagagagcaccgacgtcaaggacagctcagaggcctctgactctgcctcctagagcccgcacttgctcctcaccccaccctggcc

SEQ ID NO: 10882 - DNA, 378 bp, Canis familiaris
  misc_feature (1)..(378): n = a or c or g or t
acaatattccaatatggaagtgataggaannngctgagaattactaaaagattttattttacttttattgattagnaggtttataggatctttgaatgnnngatttttttgtcttacccatccatggcagctaaaaaaaaaaaaatcaaaatattcaggtttacatgttagctctctcatagggagttgccatacctcacagttcaaagtgtattctatagatcagtaacattatannnnnnnnntaattgcaatttactatgcagcaaaaatgattcaagaaaaataatctacagtgtctatttacctttgtacaggcaattgcttaagttaactctgcttttaacatttgtacttggataaaatgcttatgtatgt

SEQ ID NO: 10883 - DNA, 553 bp, Canis familiaris
  misc_feature (1)..(553): n = a or c or g or t
agagcccatttagnnggtggntacagtcatccaggtaggggatgagctggtgtctggtngaagggtgatcccggcaggcacggcgaggaggggcagggcagatataggcggtggaatctgtggccttggtgattgtgcattagggagcagacaggaggaaacggacgcctgggacagcccctcctgggtgagaggtagagctctgaaaggtgactgccagatgccctaagaacgttcctggggtctagggccagaggcctgccaacaccgcaccctggtcctccacatgcccctgccagctgaagggcagccttcctcctggccagtggagggccttccagagcctttgggggtcagaccagatagctggttctggacctggctctgtggactcctgtcctacccagtccctgccagaaacagagcagccctctcaggtctgtgttgtttgtgctcagaataagctggctctgaagtgcttcaaagctaaagcacttgtgaaaacccccagctatatgctccctctgtgcatcctcctccttttgctctctgg

SEQ ID NO: 10884 - DNA, 649 bp, Canis familiaris
  misc_feature (1)..(649): n = a or c or g or t
gcagatctgcntgtcntnnagaaagaagtnaccgatnnagtcatttnanntgatatcatcacacccgagagccagaccctccaattaatggtaatagaagaaaacaaccagtatgttgtgcccaccattggggatgttttgacagtgagccagttggttttctatcgtggaatagctctagctcttgctgttgctgttttttttagcaggaattttaataagggttttcaatgaccgtggctaaaatagaagaattatcaacagcccacaaaccagacatgataaacctacatgatatatgaagcctgggaggtgaccctgtcacgtggacagcggttttgcccccagttgcgggtggaaaggatatcagtgatgctttcttagttatcccaagaatctgcactatcctatttgagatcaagaaaggagttagaattcttacatttctcccagatgttaaccctatcatggtttttaaatctgtacatttgattttccctgctggaagtattctgtactcttttgttgaatatcttccttctttcaggaaagttcattgtcctctaaaattgattgctgatccagttttgtttgtatttctctgttaatgtattttatcagtgggtatgtattaagtgcctgttcaaat

SEQ ID NO: 10885 - DNA, 528 bp, Canis familiaris
  misc_feature (1)..(528): n = a or c or g or t
tatcttccaaaacttatgacattttgcattcactcaagcatgaaaatgtnctgacatcagcagtcntgtatctgtgcagtaatctgtgagcataggtaactatttcttgacatagnctgaaatgtatgaatccatatatgtttatgtacagtaagtgttctcggtatttggagagcatctacattctctcaacattgtgtaatactgaacacaggaaggtatgaactgtcttacaaagttcaggcttgtttacatagtaagtttctaaagtcagtcttcatttaattcattaattaattaattcatttcttaatttaaaactggggtgttagcctgttctcccagagatattttaatttttacctttgactacttatattttatgtagaactgtacatttcctacccacctgaagagttgaggttataacctttcccgtcagtactttctttgatcacttgatgtatttttcatatcaaatttctaaaggatttttacaagaacaaacaggtttgtatatgtctgtat

SEQ ID NO: 10886 - DNA, 573 bp, Canis familiaris
  misc_feature (1)..(573): n = a or c or g or t
aataagtaaagtatatcgttctttaggggagagtggtgaggaaaagattatattcttctttatatccttttgtatatgtgaagtagttcattataatttttaaagaaaggctaagatcagtaacactgacttctagttcctttagaactctgaggggctcgagaaaaaatctgatttagcccttttatttacagactggggaaactgaagaactgcgtagctttctggtttctagaaataactaggctaaacccagatttcctgtctctttattaaataaatggtttttgaatacagttcttcgagaaggaagtggtgatcactgagtcagttatgagcttgttaagctgatttcattttcttccctcatccaggtcacttgataaggagaagaaatgctcaagtnnnagtttattttcattagagcgagtcacttggtgaagttttgtgaactccttgggaaaggagagcgaatgttgccaggtattgactatcattaggtgggataattagtggcttaagaacaacattggaagatgagttattcatcacgagtnnntgtcaaccatgagg

SEQ ID NO: 10887 - DNA, 674 bp, Canis familiaris
  misc_feature (1)..(674): n = a or c or g or t
ccaaagaaacattaagaactttgtnnngctgtataaaaagcaactaattttttaaagaataaacattttaaagtcagcaaacatactgtgtccttgcagaagttgatgtgctgannannagagctatgggtggtgggtcttttttcatagctttccaggcttgagatttttgattttgattttttttttttttttaatgtttggaacataaatgaagatttgatacattcttccattatctgaaaaggataaattcctcctactcactgtaagaacttcattttataacaaatggcatatcacaggatttgtccaaataataaatattttcagtatatgaatgtaaataatcatagataagaatgtacttagctgtattttcaaataagtaccctctccccttttttaagacaataaaactgggcatcgattaacctgttcttcctgatatgcctagaatttcgtcctgataaccctgattcattccattatatttcaagaggattcagagtgctagaaattattttggcagcctataagatatcctaacactggtccttgggcctgtggcccacaaatgactcgataatagagttccttgctaattataaatcactagtaaatctttttgatattttaagctatagtgggggaaaaaatctggccacttttgt

SEQ ID NO: 10888 - DNA, 672 bp, Canis familiaris
  misc_feature (1)..(672): n = a or c or g or t
tagtnnagtagcttgtggtgtagnctagacattgtannntacccaaatacggttaaaaagtgctctgaagtaaaggtacatcattctgtgagaacacaactgggaaaactaaatcatatttgtngagctgtttcaagagtcctaggaagactccactgcccccaaatacttctgctatccactggccattgctttatattcctcaagctttcgttttttagttcaaacctttgatgactaatcaaacacagatcctccaaaaagagtaagagtgacagaacatttgtacctgtgaaatatctttagactgcctggttcagagttaattactgtcttccaagggacataacaaatgaccacaaaacttagtgacttgaaaaaacaaacatttattatttctcataaatcggtgggttagctgagtgattcttctggctcaggctgggaggtctagagtgacttcattcacatgcctggagtcccagctgaaatgactagggtgcttgaggtgcccctctatgtgtttccatcttccagaaggctgcccagcctcgttcacatggtgttagaagtttttccagcagcaagagggcaagctccaaagaagatacttctcaagcctctgtatcatgtttgccagtgtcccactgactaatgcaagtcacatanaag

SEQ ID NO: 10889 - DNA, 590 bp, Canis familiaris
  misc_feature (1)..(590): n = a or c or g or t
agggctttgctgcctcttctcacattctcctcctgctctgggccccacacccagaggtgcgggcagcttctccagccagtcttcacnntcctggtggnntcacaggatcttggacttgaaagagcccatagaaagcatttggcgtccaaagagacgaaaaatctgtgagggggaatgacctgcccaaggtaagaagccaaggatgtcagagacggggctgcagccgtagaacccagctgtcagctgttattcctggaacagatgtcttccctccactgcatggccattgacttctgtcctcgccctccatggtggcagctttctttccctggggctgtcacagaacaaactcatgtcagtgggtgttactgctctcaggtccttagcgcagaattcaggcaatgaccaaataaccacaatagggataagagaaagaattgttcttttactcagcaagagtctactaggatatcctcagcgttggggaggcggggggacagggaggagcggggaagagatgcatgcttcctcgacccaccaggaattataagccactccgggtagaaatttcaaggagaaaaaaatgtaaa

SEQ ID NO: 10890 - DNA, 622 bp, Canis familiaris
  misc_feature (1)..(622): n = a or c or g or t
ctaanncagcatcctgtatgcagggaccaagnnagcagcctgactcatgttaatgtcagctcaaaaaaaaattttttttattctttcttaacaatgccctgttatgatgatcttataaaattcccaaagcacagaatttccacagcaagaatacacttattttaattaacaacagcatatatgtgacacagggcattgggtttttacttaatttatggtgtacatggcttatcctttgcccagcctgaaagaaaatgaagagctagagatgcgtaaagtgcacgtctttcctctcgtggatgagtgcacttactgatttgggttgtgtccagacttatgaccccaggttccaaaagggcactagtgggatttcagtatgctctgatgcttgaatgatgcagccgtgatatttacacacacacacatacacgtatgtccacgtgcttcagaaatgttgttgcttagggtgattttggtggctgagtaataagtacctataatagtcgcatcattgtcttcctgctttttaaaatgaaaatgaattgtgatttgaaacaaaatggaaatgagtctagcattccaaaaaatgctaaggatggttggttacaacttaagaattttg

SEQ ID NO: 10891 - DNA, 536 bp, Canis familiaris
  misc_feature (1)..(536): n = a or c or g or t
ttcatggcaaaagaggattgctgttggcagtcagcagattggatgcaactgatacaatgcagccaggttatgaatcggtaaaggactgcagcagggagcaaaagggaaatggaaatgcctcaaggacctgaagattggagtgaccgagggtaccccagaacagtggcacctgagaggcccacctgaccccaaagctttcagaaatgaaaaagcttttcagttttaaaactttttcgtgtgtgggggtttcccctcttggtttgttttttttgtttttgcttttgtttttttttttcatctgttgtgttgagacagtaaccatgatttaaaagacatagtcacctcttctagctccaggaaccagatgccactccttaaggttatttcacaatgtggcaggaaccggtttgtnnnttctttnntcccaactataccctcacagacatcaccaataaggaagtaatggagggcttgtggtacatgacttctcatccagaagtctttatacgctgcttcacatttnnnnnnnnngnnnn

SEQ ID NO: 10892 - DNA, 458 bp, Canis familiaris
  misc_feature (1)..(458): n = a or c or g or t
aagtacataanngtacataannaccaaaaatatgtaccanngtacattttgatnnnnncantgttcttaaaactaatcagtgtttaatgattattctccatngagcctgtactctgctttccatagcaaggaaatatgaaatacctacttgcacgtaacaaaataaactgtgtaactacttggctattggagctttgtacttcagaatgtaaatgtacatcagtttttatatatttgtgaattcatctgtgggaggagtaaaggaaatccaagagtatttaatgattaatgtggttttcttttcattctgtaaagatnnnnnnnnctatttttatattattttacttatttggaatttacagaacacacttaagtgattaggatataacaaaattacattttatcatttttgcaacttttttgttttttaggtctttatttctaaaaaagatgaaaat

SEQ ID NO: 10893 - DNA, 229 bp, Canis familiaris
cccccaaactctctccagaaccccagaccccctccctagcccccacaaggaatgcgcccagcactgcagggctcccaaccccacctacttccctcttggtcccagctaccaaggctgaggtggggccgacctcccggtgccctgctgaagctatacccccagcaggcctgaccaaaaaaggtgcaccctgccccacacctccaggcccatagccaagggggccgctggc

SEQ ID NO: 10894 - DNA, 551 bp, Canis familiaris
  misc_feature (1)..(551): n = a or c or g or t
gtcannaaaaatacagaacgtggtnnatacagatnnaaagttaaaannaacaagcttgatcnnaacnnnnnaaatgacatctnnagtcaaagaagtaaataaagagaaatccagaccctcaagacaaaaagagatgatgggtaaaattgtgagaatgatccagttaccggaaagtggtttaggagtcatcacatcagaagaaggttttccaagcactgcagtggctgaaagcttgcttctgtagcattcctacttccctgtgcaactgggttctgttcttacctccctgtccaatatgaggtcgactggctgtgcctttgagaggcacttcatctataggctggagttttttgtttttctttttgtttttgtttttaatccaccctcacattctgaaaatagaggtgaattcctttaaggctaattcaaacttcaaatgaaccaactgttggcattccagaaatacaccagaaaacgtgggattctttaacattgcctctctgcaaaaggagttctaatctcatttattatttaaaaaaaacaatgatatt

SEQ ID NO: 10895 - DNA, 452 bp, Canis familiaris
  misc_feature (1)..(452): n = a or c or g or t
aacagaaagaaagacanntcatttctacaagaggtagncctgcacagaccactgggactgacagagctggtgggccctgccaggtccaaaagctaaagaaatgacaagatggagaactgtaaagaaggaaagaaaggatgaaatgtgtcaggtagaaacaagaaaaaaggagaaaaggaatgacagtagctaaaatttactgagtacatatgtgctagacattgttataagcacattataaatacaacagccctttgaagtaagtattatcactgcctctattacatacaggggaaaaacagaggtactaagaaggcaaacaacctgttcaaggtcattcagtatgtggtcagcccaggatatgaccccaggcagtttgagttaggcactaatgctctttcaacagtatgtacctgcttccattagaagttcatgtgcagggcagccccggt

SEQ ID NO: 10896 - DNA, 441 bp, Canis familiaris
  misc_feature (1)..(441): n = a or c or g or t
gaacccacgcttggtgagcgggtannggcgcatcatcaaaaaccctatggatttctccaccatgcgggagcggctgctccggggagggtacaccagctccgaggagttcgcagctgatgcgctcctggtctttgacaactgccagaccttcaacgaggacgactctgaagtgggcaaggccgggcacatcatgcgtcgcttctttgagagccgctgggaggagttttatcagggaaaacaggccaatctgtgaggcaagggaggtggggagtcacctcgtggcatctccccgccctgcaaacaaaaaaccctgccattctcacctgctgatgctgccctgggtccagactcaagtcagagagctcagcctgatttttnnncttaccctcggnagcgncnnnnatcctcttctccctacagnnnctttnnncntttcctcct

SEQ ID NO: 10897 - DNA, 481 bp, Canis familiaris
  misc_feature (1)..(481): n = a or c or g or t
cctgctccagnnnnnnnnnnnnnaacaccacacaagcngagtgctgttgcactcagggcgccagctggggagacacctgtgacccctgcccagctgaggactcagttgaattcagtgagatctgccctagtggtaaaggctacatccctgtggacggagcctggatgtttggacagaccacgtatacagatgcagatgagtgtgtgatgttcgggcctggtctctgccagaatggccggtgcctcaacacggtgcctggctacatctgcctgtgcaatgctggctaccactacaatgccgtccacaggaagtgtgaggatcacgacgagtgccaggacatggcctgtgagaatggtgagtgtgtgaacactgaaggctctttccactgcttctgcagccccccccccgtcacttcacattccattactctgaacaacatggtttttcccatttgtaaacttnnnnnnttatagatctgtct

SEQ ID NO: 10898 - DNA, 577 bp, Canis familiaris
  misc_feature (1)..(577): n = a or c or g or t
agggagggtgcctggtgtgtccnntgaggactgagcatcacagtctcccatgtnntctgccgcccattggcacggtggtgaatccttaggatggccacttacttgcttgcttcctcttagattgccattgtacacggagccagaactagacgtgttttcagatttgtaggctatttttttaaaaatcaggatttttattaccaggctctcctcctcacccctttccccagctttgccaagtaatttgtgggcatgaaacttgtggctaaatcaactgaagacacacttgcagcacaggtgatgttttaggtgatgcattcagttcatattttaaatttcaggaagttttccatttgacattttttcaaatcaagttaatagtagaatgtagcgaggtggatttttggtggctacatagtactggaaacactgcactaagtagttttaatacagcttgaccatttgctatccaggaatatagtatggtacattcttggtcttggtgtccctactgtgctggccacagcttctcccagtaattatgattgggacgttctttggtaactgccattttgct

SEQ ID NO: 10899 - DNA, 493 bp, Canis familiaris
agacttattgagaatcataaacttcctgcacagcccctggaaaagccaattatattaacagagagtctttttaatggatctcattatttagagatgttatgtaaaatgaccacagatgatcagagatatagtggatcgacttacctgtccgatcctcgtcttacagcaaacggtttcaagataaaatggataccaggtgtttccattgctgaagactacttggaaatagaagaaatggctaattgcctcccattctatggagtgatggacttaaaagaaattcttaatgctatattaaacaaaaatgcaaaagaagtttatgaatgtagacctcgaaaagtgataagttatttagagggggaagcagtgcgtctgtctagacagttgcctatgtacttatccaaagaggacgtccaagacattatctatagaatgaaggaccaatttggaagtgaaattaaagagtgtgttcatggtcgcccattttttcatc

SEQ ID NO: 10900 - DNA, 568 bp, Canis familiaris
  misc_feature (1)..(568): n = a or c or g or t
tcattcttgtgtcntcaatatctaacagacttaataatggtgcttgagaagtactgttgcttttaccaangatgctctgctaannnacaagtcagcaaataattttcgagcgtctgccatgtgccaaccactttgctaaacagcagggatatattgtgaactgtgaacaagaccaattgaggtccctatttttgtgagacttgaattgtgatggagggagacagatgatgagcacataaaccagtaagctgatttttggtacagttaagtgctgtaaaggacgtaatgcagggagcatattcatctaacatactttagcagacattctagttactagcatccacaaaagagaaaaagagtagtcatacaaaatggacgcaattaacttttgtatattgatcttgtacctaatgactttgctgaacttactagttctaatagttttttagtggattcctgtactttctatatacaagagtgtgtcatctgagcatatgggactttttagtttttcccttctaatctgaatgccttttatttatttctcttgcctaattgcttggccaga

SEQ ID NO: 10901 - DNA, 529 bp, Canis familiaris
  misc_feature (1)..(529): n = a or c or g or t
gggtatctggtgaagatcattttaggtnactgaccaagggnannaaatgccccagtgatactggacccacagccatattgccagcaccatgtctactatacaaagaaaaggcagcagccacctgtttgacagtttgtccacctgtaaactgaagtttccagaagaccagcgacagcaagaaaaatctgtcattgctcaaccaatatttgtttttgcaaagagagaacaaacttttaagagacctgcagaggactccacctatgaagcatcagaacatgaatgcaatggttttctgagaaagcgcgtaaggtcttcatcttttactttgcacactacacatcctcagtccccaggagcatcaagcttgtcccagaatcgaataagatcatcatccttcaccaacctcctgaccttccccccttctgggccagggtgcctggtggctcagtggttgagcatctgctttcagctcagctcgtgatcctggggtcctgggatcgagttccccatctggctctccacggggaac

SEQ ID NO: 10902 - DNA, 536 bp, Canis familiaris
  misc_feature (1)..(536): n = a or c or g or t
aattgatgtaattgtatgcaacttggttgtagtnnaacaattccaattcataactatgcagactttttaattttcctatctgattggtaagtattctttagtggttttgggtgttttgttttgttttaaacctgggattgagaagttgatgaatngaaattcatcctttaacttcattacatgtgggtttacaataanngagtcaaggtgaagtttgaagtttgggggcagggggcgtgtgtgggttgataacttaaaaaaataatgggctctgattgggcagctactcatttgagttccttccatttgacctaatttaactggtgaaatttaaattgagtttatgagctcatcttcaaaacttttgctagaagattttcagctgttccaaatgggacttactaacagtatgtatataaaaagatcacatcagtggatgagagacatttgatcccttgtttgcttaataaattgtaaaatgatggcttggaaaagcaggcttatagtctaaccatggtgctattattaggcttgct

SEQ ID NO: 10903 - DNA, 684 bp, Canis familiaris
  misc_feature (1)..(684): n = a or c or g or t
cacatttcattcancaatcatgcactcagtnactattatgtcccanncaacgtgctaggtgttgaggacagaggctcaatcactgctagtaaggggtnngaatatcagtgtatgaactatgttctacatttttgaggagatttcatttttgcaaattgtaaaatgctattttcctgattttattaaaagactgaagaatagggaaagaaaaaaataatgccatatagagctaaactacattagtaaactatggctatgtctcagtcttcctgtggctaggcacattaagaatttttttctataaaagttaacagttacacataaaaccttaaagctcagttctagactctgaaatactacccacaggtctcaaaacaaaaaggccacttacgagggtttcctgtaaatataaaacctttccctctcatggtcttcgtccttttcatccttctcagaatcttcactagaagaagataaactgtcatcccgtcggccctcttcaggttggaaaggaatgcctgatgaatagcctcctggagttttggcagaactgaacacggaatatgatccttcactgtttgaggagtaatgggatggaccttcaatggttactgacaaaaggtcgagttctgtctcctctggaaactgattgattataaaaagagaagacgtgaatcaggttca

SEQ ID NO: 10904 - DNA, 478 bp, Canis familiaris
gctcgcaagcacaatatgtgtggtgagactgaagaagaaagaattcgagtggacatcatggagaaccaaataatggatttccgcatacagctggtacaactgtgctacagtcctgaccttgaaaaactgaagcctcggtacttggaacagctacctggacaactgaaacagttctccttgttcctggggaaattctcctggtttgcaggagaaaagctcacctttgtggatttcctcacttatgatgtcttggatcagaaccgtatgtttgagcccaagtgcctggatgaatttccaaatctgaaggctttcatgtgccgttttgaggctttggagaagatagctaactacatgcagtctgaccgcttcctgaagatgcccatcaacaacaagatggccctgtggggcaataagagaatatgctgagcaggaggtggacttgatctgcttgttttattccatcctgtgcctagggagc

SEQ ID NO: 10905 - DNA, 452 bp, Canis familiaris
  misc_feature (1)..(452): n = a or c or g or t
atgtacatgtatnaagtcgtcaactnnnnncaacaaccggagagagtaagagcagtaagagcatgattattatcancngnnaaataaggcattagcgtgttaaatatcctgcctgaggttacgccattagaagcnctgctgggacttaaatccacaaagcccgcttccaggcctgtgctcttccacctccgtgctatgccaccaattgcttcgaaaagcccagactggagctacctcacgtccttaccacctttaagtctgtcacctcatttgtacccatattatcctttccctgtaatcctgtgaaatggaaaaagttagttgcccctctttttgtctccagtaaatctgttcatttttgttcccatcttctcagagatcctgtgtaagattattccctccccttgttacccaatctgtattgtctgttttctttaaacaattaactgcaa

SEQ ID NO: 10906 - DNA, 517 bp, Canis familiaris
  misc_feature (1)..(517): n = a or c or g or t
atcgaacatgagacgtcattgattttagtagattctccattttccagaatgccttccgtcccagatttcaaacttggattttgaactgcagacctgtatgagaccccatngnnntnnnnaatatggtntgccaaaatctataagctgcttattaaaaatagagtcccgtgtttcctaaaaatctcctaaaacnagtctatgaactcagggctttaaaacatttttaatttatttggtcattcaatttacttgtttttaacacatgattctctatgaaattggtggnnnnnnnntagctgtgaacgttctcagagagtgaaagcaacgcagannnnnnntgtggttttaaagccttgagcattctgaggtggtcactaaagttttatgtcagagtgatactagtgtgctcctgacagggctgacgcaagctcttcaggacctcgggcaggtggcccgccgaggcgcccatgggtgtcttgtcctgccattgcctgcctttcactcagcttgaaataag

SEQ ID NO: 10907 - DNA, 513 bp, Canis familiaris
  misc_feature (1)..(513): n = a or c or g or t
agatgctaatgagtgggtttgaattagnntctcctgagaggggagattactatgctaaaaactgaaaaatgtnngaactaaatggtgggtagtggagtgtttgcagcttatctggtcaaggagattgagcttatctgtatgaagagcacagtaggtccatcgtgagtgggatgaactcctgaggcttatggttggtggctcctgtagcacgctgaaaattgctgtgtctcaggagtttctcttgagattcaccttttctgaagtgctcaaaaaggccagtatccttgattagaattttcttgtaagaatatatttacgacatcctgcttttatctagaagagaagcaaaaggaaaatatgaaagcagtacataaaatctgtgtgttgaattgatacctgccctgggtgattgttacttatttcacctacattttacatgatgaatactttagaataaccacttttggagctggaagggggaatctataaatggaaatttatttttgtgttttg

SEQ ID NO: 10908 - DNA, 174 bp, Canis familiaris
cagaaccgattggttttctccctttacatcctcctgaccttggttgccatgacaaccccaagggcccctcaaaatgacatccaagtgcctttagcatcatcagcgacgggaggagcgtgttctcagcagcgttgggacctgcagaacggcagcgtattgggatctcccaccccc

SEQ ID NO: 10909 - DNA, 526 bp, Canis familiaris
  misc_feature (1)..(526): n = a or c or g or t
gaagctcagaaaagaccccaatattatcatagccaagatggangccacagccaatgatgnnccttctccatatgaagtcagaggttttcctaccatctacttctctccagccaacaagaagctaaatccaaagaaatatgaaggtggccgtgaattaagtgactttattagctatctacaacgagaggcaacaaacccccctgtaattcaagaagaaaaagccaagaagaagaagaaggcacaggaggatctctaaagcagcagccaaacatgccactttgtaaaaggactcttccatcagagatgggaagaccattggggaggactgggacccatgtgggattattactctcagggcagagaggacagaatggatataatctaaatcccgttaaattttctctaaactgtttcttagctgcactgtttatggaaataccaggaccagttgatgtttgtggttttgggaaaaattatttgtgttggggggaatgttgtgggggtggggggactgagttggggggtt

SEQ ID NO: 10910 - DNA, 543 bp, Canis familiaris
  misc_feature (1)..(543): n = a or c or g or t
cagcaccctctacctgaacntgtgctgcctcggcntcctnncgctggnntactccatcaaggcncgagaccagaaggtnnnnnnnnncctgnnnnnagccnnncgattcggctccaaagccaagtgctacaacatcctggccacgatgtgggcgctggtgccgcctctgctgctgttggcgctggtggtgaccggggcgctgcacctgtcccggctggccaaggactctgcggccttctttagcaccaagttcgaggactcggactatgactgacgggctgggccttgtccgcatcctgacccgtggaccctgaccccaggaccaccccccagggcagtgtccccagggactccatcctgtccccccgtccctgcccggaaccctgactccagcacagggcctgatgccccaccccctcccaccccagcctgggcgcctaacgctgaccctgaagatctattgtgtggatcccggtnnnnnncactccaactgtgatgccccctcccccaacactgtgcccagggtgcaccctccctcctcgc

SEQ ID NO: 10911 - DNA, 70 bp, Canis familiaris
  misc_feature (1)..(70): n = a or c or g or t
cancttgcagtnnngccccctacccccgccctcatcaagcaccatccatgggggaacgggagtcagccag

SEQ ID NO: 10912 - DNA, 347 bp, Canis familiaris
  misc_feature (1)..(347): n = a or c or g or t
tgctnnntcagcacagagagccagannncagtttcaggcaaccagnaattcctgatggggttatctccagctggttcctttccattcnnnntacannncaaatcgggttctgtgaaaacttcctgcgttttatctcaagctctctcactgtgaattcaggtctcaggatcctgtctagtcccactcaaattaaggcngnnnaaacatgtcccttccttgaaatacatggagacttctgaaagcaggggcaatgaaccttcaaaatgagaccctgaggaataaagctttgattaagaatgttctgttcacatcccccttttccatacttttcatgtgttgatgtctgc

SEQ ID NO: 10913 - DNA, 580 bp, Canis familiaris
  misc_feature (1)..(580): n = a or c or g or t
catgagnntctgcctgggctcccagctgcacggtggcgccaagtacattatcgatccgcagggtggcctgtccttctccagcgtcaaggtccaggagaagtccacgtggaagatgtgcatcagctccacggnnagcgnaggnnaggcccccggagtgggtggcatcaagnncttctctgaccacgtggcggacagctccaccgagttagaacggataaagagcaagaacctgaaaaataacgtgctacagctacctctgtgcgaaaagaccatctctgtgaacatccagcggaaccctaaggacgggctgctgtgcgcctccagccaggccagctgctgccatgtcatctgacctcggctcccactggccactggcgcgcttcctgctctgagtggtgaagaccggctcacttcactgctctcttttggttttactcttttaaagtgggcgttaggagcagttatttattaccttttcgttggtccgcctgacgatgtgacaatgcatggtctttgtgcatgctgctagatactacttttcttttccagccgaaaagnnnattgtgtaatttttacattt

SEQ ID NO: 10914 - DNA, 292 bp, Canis familiaris
  misc_feature (1)..(292): n = a or c or g or t
cactgcctctgaaaccnaagctctcaccccaaggcataaggactgagatctcctacctggttctctgggcccagctgagtatcagagaggccatgtgtgtactcaccactttccggggagggcaaggtgagctcaggagctaattgatatcttgacttaaaataagcatgaaatnnnnnnnnnaaaannnngngnnnctttaaaaaaatgtaatagtcatttnnngcatgaattggattaattccatctggtgataaaaaagaaaattgttatctcatgcataaaaaattca

SEQ ID NO: 10915 - DNA, 269 bp, Canis familiaris
  misc_feature (1)..(269): n = a or c or g or t
aaattgcaaaatacattaactatggttcttaaaaattgcattcaaataccattttacataggaaacatcttaaatactgtggaaactattctactgatgtatagcaacttttctttggacttgtttttttgctcagcatgaggttttatatgctgcattttactaatttcatatttaacctgtatttttaatacaaaaaaacattagggtatagatcatgtgaaatgactggtgccttcagggacaattnannnnctttcaataagtgt

SEQ ID NO: 10916 - DNA, 545 bp, Canis familiaris
  misc_feature (1)..(545): n = a or c or g or t
ggcccaggaatacnnngtaatgacagagatcatgctgctccaggtnnctgcaggtaannacaacctacagcccaaggatccatgtagngnntcattcaagtctatggagtggctcaacaaggatgagaagtgagacccatcaggagcctggtgagggtagaggtggactctttctggtggccactctggggatccatcttctttggctccctgagcagcctcaagccctcttgcttgggcagcagactctggctgctgggaaaacactgggaaggactcctgaattgaagttcctggtcaactcacacatgtcactctgtccttagctacctcctgtcctgccagctgaagccccagtcctggctggccagcagaactcaagaacaaaaagaactggccactgtcaagcacagggctgagtgagtgtccagtggcaatgcaatgtttcctcagcagctggagcacttgtggtacttgggccccatctgctcaacaccccttcttcccatctattcaattattttaaggggcaatatttaattttc

SEQ ID NO: 10917 - DNA, 583 bp, Canis familiaris
  misc_feature (1)..(583): n = a or c or g or t
ttgcactggnggcatcccttcaccccacagcttcccaacttgaaatccagatttacctccagggagaggtgagaaaaatttgtaaatagacttgctacagagcaactcagggttggggtgtgttttaantctcctgatcacttgaaataatctgtaggctgagtgcttatgggagtgggggaaaatgtgactccagggtcctttccttctgcaaaactctgcgggtggagtatagggcatctaaggccctttgatggcactacactgagctgtctgtccttctggaaacccaacctacaatcaactgcaaatccaattcttcacattccagttgtagcctttctttccctacagaannncagtccctggcaatgtggtcaaggtggctttctgtaagccaccttgatttagggaatggaaggtgttacaactctgccttcaagactcatctcttaaaagctaaataaaacaaaactacagtcaccttcaaaacatacaaaaagaaggataactgtttaactgaaggaaggatttggtnnnnttcaactccacggtcnnngtgcctttacttgtgttagatttc

SEQ ID NO: 10918 - DNA, 558 bp, Canis familiaris
  misc_feature (1)..(558): n = a or c or g or t
aggtanngagaaatgttaaggattcatcggtcactagacaatgcaaacacactcacgatgtagaaggttatcatcagtctaaagccctattttctaaaactacagcaacgtgagaaacatcgacgaaagcggtgcgagttgcaaactccggtgttccccaggcacctctgggcaagcaccaagctgggtctagcactaatacctaccacggcacgagttagtaaacaagcacacgaactagcaaagaatgtattcacaacaggtccccgaccgtccatcccgggaaacccctcaccaggggccaccggctcgccattcttcggtgttcacctggccaaacgcgtcactcttgtgcaccgaagagttctgttctagagacttacccaagggtgaacacgcaagtgtacattgtaccaacgtgaacgtggcctcggaaaacttctaccgcttgctggatcgcacatcaagaagagggaacgatgagtccagggccaaccgatctggcgagggagttaatgtacgtctgtggcnnnncagctttttcctgttgaactgtgg

SEQ ID NO: 10919 - DNA, 458 bp, Canis familiaris
  misc_feature (1)..(458): n = a or c or g or t
gcagtgtgggccagcatgctggggagcctgtnnagnagctggccctctcccactgcacccacttcctggccagcagtggccatgaccagcgcctcaagttctggaacatgtcccagctgcgggctgtggtagtagatgactaccgccggcgcaagaagaagggagggccactgcgagccctaagcagcaaggcttggagcactgaggacttctttgcaggactgagggaagagggagaggaatccacagctaagaaggaagaggaggagagtgaggatgacagtgattgaggaaagaagttgactctcaaaataggacctcactgggcaagtcttacatcctgggctggatacctagagaggctctgaatttaaaatactccgcagtgcacaaagatgcatagccagaggctcatgactgagggcagtgatgtgaggaagtacttgccctgtggcagc

SEQ ID NO: 10920 - DNA, 260 bp, Canis familiaris
  misc_feature (1)..(260): n = a or c or g or t
tccctggggcctgtttggnngtcgtganntccctannnnnntgctgcagnnaatgcagaaggggnngcattcccnnnnnnnnnaatgcaataatgcnntcctnnnnncgccccacccagagaggagccccctcaccgtggagtctgttacctctgcatccgaaacactagtctgctgtgaaccccccaacctccctgcctcccctgccccgtgtccccctcagcctagccccagacggaaggggcaggagggaggatggt

SEQ ID NO: 10921 - DNA, 612 bp, Canis familiaris
  misc_feature (1)..(612): n = a or c or g or t
cccttgcaactaacnaccaccngtnggtcccagcataagtccctggtagagaatggctgtcatacagggagatattgagcttcccaggactgacaagaccaacgacacacacagtatcttcagcagccgtgggccatctcctcatgcctccagactactggggtcccttatgctcagtcaggaagttggaactgagagaaactatctgacagtgacacaggcttctgctttgcacattgcatgtcagccttgccctgatgagattgaagtgatatctatagtgggtatgctttcttctgctgagtgtgggctggactttgtgactcacttcaaatgaacagtttacaacagaagtgataggatgtcatgtcctaaggactctgccttctgtcctaggtgtgctctttctcactctcctggcttgtgttgctgtatgggaatccagctgccatgccataaggccgcactgaggagaacactgccaacagccatgggagtgagctcggaagcagatccttcaagttgagcctagagatgactgcacctctagacaacaccttgactgaagcttcgtaggagaccccaacaagaaccattggctaagctgcttct

SEQ ID NO: 10922 - DNA, 366 bp, Canis familiaris
  misc_feature (1)..(366): n = a or c or g or t
gccggagagaaaacagtacctcagcctctgttcattggataatatgacaaatctcaaaacatattttccactcaaagtaatgaacacgagccaaagaaactttgtgcaacacctgccaatctttgtattgcatgctttttttttttccagaagttttgtctctgcttttaaagctaattgcccacannnnttcattaacaacgctttcctctaagattgcaagttcaacactgaaggtgaaatgacaatgaacttttcgtgattccaaaagcagaggcaaagggcaactgctgagagggttgttctacggcccagcctttccagagtttgaaaaggatgatcttcgcagcaatggccaacaatatc

SEQ ID NO: 10923 - DNA, 633 bp, Canis familiaris
  misc_feature (1)..(633): n = a or c or g or t
actcagttgatccctntagccatcgcccaacctccntcgcagtgggatcgctccgctaaggtnntaggtgccntagtccccgcccaagacatgcgccgtacggtccgccacactcatcatggcggcggccgccggacgtaacttccgcccgcggccggaagtgcgggtcctgcgagcatggctgcgtcgaaggtgaaacaggacatgcccccgccggggggctatggccccatcgactacaagcggaaccttccgcgtcggggactgtcgggctatagcatgtttgctgtgggcattgggaccttgctcttcggatattggagcatgatgaagtggaaccgtgaacgcaggcgcttgcagattgaggacttcgaggcccggatcgcgctgatgccactgttgcaggcagagaaggaccggagggtcctgcagatgcttcgagagaacctagaggaggaggccatcatcatgaaggatgtgcctgattggaaggtgggtgagtctgtgttccacacaacgcgatgggtgactcccatgatgggtgagctctatggactgcgcacaaatgaggagattctcaacgccagttacggcttcatgtggtacacgtnngggcctgcaccccttggacca

SEQ ID NO: 10924 - DNA, 584 bp, Canis familiaris
  misc_feature (1)..(584): n = a or c or g or t
gcctggctgcgacagcagggggccactgactggggtgacaaacaagcctacctnnnggatnngctgggggttggtgccacactggccactgcagataacttcctggtcntcctgcgtcggtctcggcaagtggccgaggcacctgggctggtggatgtgcctggtgggcaccctgagcctcaggccgtgtgccctggtgacagccccctgcacaaggacctccctggggagctggtagtgcatgagctcttctccagtgtcctccaagagatctgcnnnnaggtgaacgtgccactgcccaccctgagccagccgctgctgttgggcattgcctgcaatgagaccagtgccggccgtgccagtgccgagttctatgtccagtgcagcctgacttctgagcaggtaaagaagttctacaccagtgggggagctgaggcccacgagtcgacgggaatcatctttgtggagatacagagagtgcagaggttgcaggagaccaaactgtgggctgagctctgcccctcggccaaaggcgctatcttcctctacaaccaagtccagggaagtcccgcctgagtcatcct

SEQ ID NO: 10925 - DNA, 333 bp, Canis familiaris
  misc_feature (1)..(333): n = a or c or g or t
cacccanctccaaggnnncactaatttactttctatttataggttttatggnnggtgttttaaatgacagtctctgtgattttaccctgttcacaactgnnggttcacatctcaataaatgtggcgaaaaaacatcaaggaaactgaataactgtttgcttaacaacaacaaaaaaaatgtcattaaccaatgtaatttcctttctaggatttatacaaactgaccacacactttgccataaagtaatttcaaagggttcatatccaaaagactgcatttttggccataatgaaattaagtaaatatctatgtaacaacctcataaagttggc

SEQ ID NO: 10926 - DNA, 597 bp, Canis familiaris
  misc_feature (1)..(597): n = a or c or g or t
tcctccaatnnctgcagagagaccatncngagtnctctggaatagcagcaaaatcaaaaaggatgatgattctaaacatggaaagagagaaaannccagccaacttgaagagaccagaaatagaaatggcctaacatctgacaaagacttcaagccaagtcaagctaccagaataatttactatgactttctgacaatattctcattgggaggctattaagaaagataataatgtggtttctggagggaaagttcctgggcttgaatcccagttccaaggacactgagtaacttttcaccttggcaaatgcctttcctttgcctcaattcccatattctgaaaaaaaaatgggtgacaatgcctacctcatagggttataagttctggatgatgtagtctgttaaaagcttagtgccttgaacatgatgatcacaataaaattttaataaattttaatatgtctgtgaccaagctctggtcaagagtagctgaacgattcctcttgtgggcttccagagaaggttaatcatttctacagacatagttgacactacacatggtacctgtcgtggatttatccatccctagaactgtct

SEQ ID NO: 10927 - DNA, 536 bp, Canis familiaris
  misc_feature (1)..(536): n = a or c or g or t
gggttactnncangcggggaccccccactgccgagctgctggtgnntncagtgcactgagctgatgaacccacagctggactctgcttacttgtaccattcaccacgtccaaagaaacagcaaccgctgtagcctgatcgaaacaaaaccgacgcagccctcactgctcaggtgagcagcgtgtgcacacatgccctcacactacacaggagaccgctcaccctgacagagatgcctttttgtgaattctgacataaatcggtctcgatctgcgttttctctttcccactttccccctggtgcatgtaaactttaatacagtgcaatcgtttgtgcattgacaaaaagggaatgttaactatgttttgatttttcttattgatgaagcggctaaaaatgttacctcgccattttatcttttagctgggaaaaatagcttggttacttataaaatgaaaattaaatacttttcctcaatgaatgtaacacttcaaatcataccactattatgtatttcactatctgaaagcaaggga

SEQ ID NO: 10928 - DNA, 463 bp, Canis familiaris
  misc_feature (1)..(463): n = a or c or g or t
aggcagcaagtggngggcagcgcctggacccgaannngggcctccagggcccngccacccagngagnnagcctcccccgcctgccccacctgccccacctgcccacctgccccacctgctctgcctcccccacctcccctgcctgccccacctccccgtctcccctgccagccccacctgccccacctgaccacctgccccacctgctcttcctcccctgcctcacctgccagccccacctgcccacctgcctacctgcccagctgccccacctcccccacctgcccacctgccccgccgggggcgcccgcctgccggccacgctcagccctggcctgcaccgccctgggagctgggtcaccccgacccgggggcaggaccggccgggaggtacctccacccccacctcccgatgatcaatacctaaaataatggccgtggccgtgattgatggacggagcat

SEQ ID NO: 10929 - DNA, 558 bp, Canis familiaris
  misc_feature (1)..(558): n = a or c or g or t
gggtgtgggctggacagacaccccaaataatgtctaatccagggtcannnatctttttggggaagagggggcagagagagagagagaatcccagacaggctccacgctcagtgcagagccggacgcagggctccatctcacgaccctgagatcatgacctgagccgaaatcaagagtcggacacccagctaactgaaccacccaggtgcccggtggggtcaggaatctttggaatatccactggctgtggatagaacctgagaatagcctctgcccacctgtccacacctgagccctactctcacctcttcacatcctgctgacgtcacctcttccgaactcccactgtgaggagagaaatacttagtcaccagctctgcccatcctacctcccagacagggattttccagagtgtccacatctccccgtacaggttattaccccagcctgggccactgtcacctcttcccgattctgcaatagtgtcctaactgcttctccttctctgaacttgttctcctaccataatccgggctacagagaagccagagtggtgt

SEQ ID NO: 10930 - DNA, 490 bp, Canis familiaris
  misc_feature (1)..(490): n = a or c or g or t
ggcttagatccgatcttttccnnnnnngagaaccccagtgcaggacctgagtgaatccactttacctgtaacaggtgttgttgagaccgagaaagcgaaggaggactccaggagataaaacgttttttattccgcntnttctcctgcttagtgcttctaggacccatgcccccacctactctacataggccttgtaggctctacacgcaaagatcttatgtcctccttgtgaggtcaaggaagtaaagacttctctagagcagagaacacctaagaaaggaacaggtgagaaatgaccgggataaagccatgacgggcggactccagactgcctgcgccagatgtctcgatgccaaggcccctgggccccaaggaacagcacctggggcctcgccttggtctaaccaggtcctggatgcctcaggggtcatgtacaccagactactgccctcagtaagacccccggatcccaagcgaaaatgagactcgt

SEQ ID NO: 10931 - DNA, 563 bp, Canis familiaris
  misc_feature (1)..(563): n = a or c or g or t
ggtggggtgggggggaaagcttagcctagcagtcagtgacttacttgcactttttgnnnactgatagaaagtaaaagtatgttattaatttggtttagtctgtaatcttacaaagtnncggtaatttataaaggagtgtatagtagtatactgactgctaagtgtactatactgtttgctttactaatcacctaattcattgcagttcatacttattgactcaaagtttaaaaccnnnntctgtaggctttaagaattgcttttaaacctttttaagtgataaactctggaagtggtcttaaggttagcaaataattgtcagtattaaacatggcattatttaagtggtcctgctgcaagaaaggcacttcagtgaatatgtgactagtaaagcttaaatatgtttggatctaatagaattcatgaaatactgtaacttgggattgtgaatgaatggataaaataggttaaggccaagatgtttgaaatgaatgcaatattaatagacgcatatatacacaacnnnctatggttaattttaaaactactgtgcnnnaacgtgt

SEQ ID NO: 10932 - DNA, 611 bp, Canis familiaris
  misc_feature (1)..(611): n = a or c or g or t
gaactgattcaagaacgtcacaacttttgaagtcggtannntnnnnncggactgaaccctcnggctgcggtcatatatgagaacttgctccgcgcggtcccccttgccgggatgtttccattgcttcatgtttcagtaaacaaaggagtttgtgaccaactatgttttctttcttaatttaattcttctaagttgacttttctttcctcttgatactagtctctgtagcctttcactccattccttacattctcagcctctgagcagccctaggtaaggattatgctggcatcccctttttcctgtacagtggaaccccctcttatcttgctttccttaggaattgaacccttctccctgtctacctgcaacatctcctttccctttaaaatgaccatgtagtggcaagagaccttttactcttctgttagctctggactctaacattgaagctaatctgaaactgctaggaccattggggttttgggggtgggggttgttgttttgtttgtttgttttgttttatgtctgacctgtgatcgtggtacagcattagctgaaatttagccttgttttacttcactcctcccacttttttttttttttttaat

SEQ ID NO: 10933 - DNA, 502 bp, Canis familiaris
  misc_feature (1)..(502): n = a or c or g or t
ctttatattatcnnnnnntatacaaatatgacattatttttataaaaagtcaacaggatctatcatggtgggaagattatggcgcattttcttttttgtaactttctgatttagaacttttaaacttcccaacctctccttcttcccttgccccccaaaagataaatttttgtaactatacatttactttctcttagaatatcagacttatttttggtcttctactttaaacatatatgattttgaaattatataaaattgtgttctttagaagtatttgggtagacagtatacactgtgaaattattctattaatgacagaatttacacataaatgaatttcaaatgaaaaaaactatttatagaaaatcattctatcatacagttttacttttataaccttctcatttaaaatcattctttcccaaaaaactatatttgataggtaatctgataagtaattagtatgtacataggtannnnnnaaaaattacccataatt

SEQ ID NO: 10934 - DNA, 537 bp, Canis familiaris
  misc_feature (1)..(537): n = a or c or g or t
ccaatcatgttatgctgnnncatctctatgcattgtccattaaggnnnntgtgagctgcttttgggttcttcagtcatatacactcantggctccatcgttttctgcaccagataaaagaaaataaggctcagagaaggtcataatgccagacagtgtgatggtccttagtgcaacccatcgctacaagaagaagtatgtcactactctgctgtacaagcctatctgaagggatcccttcctggctcccaggatttaagagaagcacctcccttgcctttctggactggatcagtcttacttaagactggaaggctaatttgctttgaggctgatatgtgtgtttcagagcctttgagtaggatgctctgcttttgcatttgattgcagacgagagctttatgagttcatggaatttatttttaagaaaaaaaattatatatatatatatatagacatatatatatacatctatgagaggaaagttaatggaagcctcctagnnngatgtgttctctctgnnnntggggcctcgcca

SEQ ID NO: 10935 - DNA, 594 bp, Canis familiaris
cactgatccgcccatggactggcctgtggtgacgttgattgctgaagatgatcggcactacaacatccctgtgagagtgtgcgaggagacgagtctgtgagatgcgtgcctggacagcctggcaacgtggccaaggtgcacagccaactccttggctcaggccttgggactccaggtctcttacaatgacccatgggaactcttgggccctatgagccaagctggactgggctgttctgaagacaatttttgataataagagttaaccaagtgttttccctcatctttaatgcaataactttcagtgggggccttcagagcacttttggaaggtacaaggtacatcttctccataaagcaaatcatttgtatcagaggagactcattttggagaggaatctgttctttatgtctcaaaatcaaattctctttaattgtaaactggctctcagttttttcttaagatagagttttttgttttggtggtaatgggtctcttcagtgcccttcctatgcaattcagcttacatggcataactctgggatgcagtctgttaatggcacactcataacatcctctgacagtcttgttga

SEQ ID NO: 10936 - DNA, 471 bp, Canis familiaris
  misc_feature (1)..(471): n = a or c or g or t
atgatcagaatgtttaaaatgctnnatcatccatgatccnnnctcaactgataattactattcctcagtaattaaaaaaaaatcattgttaaattttgtccatacatttttataagggaaaatcaagattccataattgataacatttttcagatttgnctaatgcatacagtaacttgtgcatcttaatgtgctgctaaatgcagatttaaacatgacatctgaggatcatgacttttcctcctttcttggagctcttggtataaaattcatctgctaatgtgaattcaggtttctatacagttcatttcacactagttagttatacatgtagttaatgtttgcatgaggaaacaatgtatgtctcaatctttaattttaggtggtagtgtttattgtttacacaccctacccaaaacagaatgctgaattatatgctaatatttccatgtgtattttgttgccttgtac

SEQ ID NO: 10937 - DNA, 412 bp, Canis familiaris
  misc_feature (1)..(412): n = a or c or g or t
aacgagatcgacgagcnncttcaggagttcgannagaagagtggcagagccttcctgcacacggtctgcnnnnnnngngncgcctggcctggcgcnncgccccctcctgaagnnnnntgnngagcttccttttgttaatattttttccctcctgatatttgtttttacctttaggtatncngncggccgacggtagcagtacccaataaattgtacatannnnnngcaaagctacacataaatgccagattaaaaacaatcaagtttctctgtccgctttgacttaacgagtgggatgttgattataaagttttttttttctttaaccaaaacagtaaacaacggtttctagtacctttcccccatgcatttgtngcttcattgtggctcnnnnnntccaccctcaaacatg

SEQ ID NO: 10938 - DNA, 723 bp, Canis familiaris
  misc_feature (1)..(723): n = a or c or g or t
agttgccgtgctgtcagacaagggactgttaggtgagagttcctgtttttcacacgtctccgctcngncntcccgagtcccactgttgctctcatttgccctcatnnnngcctccgctcctgattgcacccagtgggtctggtctgcggccatgtttttgtttatttattattgttgggggggggtgcttttttgtcctatgaaggagaagactttctcgggtctgcagttcacacatctgtcccttcctagccaagtgagccagccctagcagctcctgctggggggcatggggccatgcccacaaggctgccattggggccagtgacgggagagggcggccacagggagtgtctggaccaggcccaacctgttcaaggggcccatctctgcctccctgataagctgtgcaggcgagcctggctaggccacctacatttgcacgtgggtccgcaggcaagaaggttctagaagcataacttctttttctaataggatccttttaacactattggctttatgggataattctagatggtcatatatacctgaaagtgctactgtgaggtgcttttagtccagtggcacttaacacaaagcctccaggaagtcattttgcctcttctcccttcaagcacaagctttactgcaaaagggccagttacatttctgtatctctgaaccacgggcttctgctgactgacagtactttttaattttgtc

SEQ ID NO: 10939 - DNA, 703 bp, Canis familiaris
  misc_feature (1)..(703): n = a or c or g or t
caagccaaaggctgatccagagcnaggcnntaactctcttcaattccatgaaggtgaggaagctgcaagagaaggctctgaagctagcagaagttgctcatgaggtttatggaaagaagccacctccataacataaaagtacaaggtgaaacagcaagtgctaatgtagaagctgcagcaagttatccagaagatctagctcagagaattaatgaaggtagaaacactaaacaatagattttcaatgtagatgtacaatatacctgggtcacccgagagctatgatggagatagacaaccaaatgaatgttatctgtctgctaacagagcatccattctgtagcgcatggatccaggagtaattctgaccttaaatcttattatttaagttttattatttaagaaacacagtttgcaagactctaattgccgtagatagtgagtcatctggtggatttaggcaaagtaaattgaaaatcttctggaaaggattctctactccagatgcccttcagaacatttgtgattcatgggaagagatcaaaatatcaacattaacaagagcttggaagaacttgatcaaccatcatggaggactttgagaggttcaagactttcatggggaaagtaactacacatgtggtaaaaatagcaagagaggcagaattagaagtgaagcctgaagatgggactgacttgctga

SEQ ID NO: 10940 - DNA, 569 bp, Canis familiaris
  misc_feature (1)..(569): n = a or c or g or t
ttccacacacttcaaacctatcgactaactnctaagatagaactctctgaaagtgctatcctccggacggtgtnnactttctcgcttcctcccgcccncntagcttttgacatttttttctaatatccttccacctaccaaaatagctttttgcacctaatctttacttttttttccctcccctcttgaaagttaagaaccagcagtaataggagttgccttctctttgctgtggttaaagtcatctgtttttcagaaatgtgtctagaaaattctacctattttaaaatctaaaccacagattctactttgaaactcaagttgtcaagcttatgtttgggggatgaatgtactgtccggttaacttttatctccctcattaaaattcagactatgagtgggaaaaataagagaggtgacaaaacatgagagactcctaactctgggaaatgaatagggggtagtggaaagggaggtgggtaggaggagggggtgactgggtgacaggcactgagggaggcacttgacgggatgagcactgggggttatgctgtatgttggcaaatcaa

SEQ ID NO: 10941 - DNA, 534 bp, Canis familiaris
  misc_feature (1)..(534): n = a or c or g or t
ccanannnaatggctnnnnnnnncatccccaccccaaagagccccacggcaggaaacatcaaatagataagcacatgccccagagttccccacaaggtcctccatccagcaggcaccaagcccactgctgggaatgctgcnnngaacctgtcacagccacaaacatctgacactttaaactgtagtgtggtggcactccacatccccagaggctggacagccccanagcgggatagagctctatgcttgttggccttagtagggtggatgcccgcccttcccagggcctnnncatccatacctggctcacaggtacttnntgagcaccagtatcaggggcagaacactggggcagacaggaacagacgtgaggagactgaaggtcaggggcaaacaaatttataaacnncggatgaaccattcataactgctgaagggtagaaacaacccaacaacaaagaggtaaataagacatggtccatccacgcagtggannntcattcagccataaaaaagaataaaccctcagnnnnn

SEQ ID NO: 10942 - DNA, 547 bp, Canis familiaris
ccaacagggtgatctcgctggctaacaggctggtagggggactggcatcggaaaacgtgcgctgggctgaatcggtgaagaacttcaagagccagggggtcaccctgtgtggggacgtcctgttgatttccgccttcgtctcctacgtgggctacttcaccaagaaataccgaaatgagctgatggacaaattctggatcccttatataaagaagttaaaggttcccatcccgatcacagaaggtctggaccccttgagcctgctgacggatgacgccgacgtggccacttggaacaaccagggcctccccagcgaccgcatgtccaccgagaatgccaccatcctgtgcaacacggagcgctggcccctcatcgtggacgcccagctgcaaggaatcaagtggatcaaaaacaaatacggcagcgaactgaaagccatccgcctggggcagaagaggtgggggccgtggtggcaggcggggcgaggtgggggctccaaagctagccgctggccggccggcccttgtgcttagaaacacacccgagg

SEQ ID NO: 10943 - DNA, 551 bp, Canis familiaris
  misc_feature (1)..(551): n = a or c or g or t
atgtgaatgnngtatacnattgtaaggcttatgtcactaaagatttttannntgatttttcatgatcaaagttcatacaatattgtntngacatgctttgtagtgaactatagtagcaataatttctgtacatgatcaagggtttattgcagcatttcttttcctgttctctttttttaaagggttagtattaacaaatgacaaggagtagaagagtcaacataaagattttagaaggagaacttataggacacagatttgtgattctttggatgagacccttttgaatgtgattctaaaagcttttattgagtattgtcaaatttgtaagcttcatagagatggacatcatatttataatgcccttctatatgtgctaccattgatgtgaaattcttgaccttaatattgtctttgaaaatgttcaattgagaattctgttaacttacattttatgaattggcgtattgtattactgcaagagatttgattttcagcacagtgcaaaagttctttcannnnnnatatgtctttttttttttttttttcta

SEQ ID NO: 10944 - DNA, 542 bp, Canis familiaris
  misc_feature (1)..(542): n = a or c or g or t
gagaggagagggagagagcccagcctagtgtcggaagatctgtaggatctgctgctgccccccttgacctctagctcctcatctcactttggagaatggattcctgttgcctctgaagccaggatctccaggaagtcttgagaagggactctcgagtaaagatccttgcctctttccaggccagtgtcttgtcttggaaagtttggaggatccagtcgtggcttcatctcctcgggatgaaagagaagtagggtaggcttagcacatgttcctatcgttagggcaaccctcccctggcctttgaggaagcacctgtggggtgggcatcacagtctgaagatcctccagatcgaatatgaaccgcttagggagtatcgcggtggctgttggctcccatctgctgggccccacctgcgctgggaggagcagccttcccaatgcaaggggcctcctgggcctggagaagaggtctggtcctgccttaggaatgaaagggaagccctcagggagccatgatnnngggaccttcacagtnnnncatg

SEQ ID NO: 10945 - DNA, 172 bp, Canis familiaris
agggcagggcctgacacactacagggtaccagttcccagccctaatgcttgtccaaacacacagatgcctccactccaccccagatacactgggccagaaaatgggcgggctggcccatcttccagaagggcagaagtgctggggaagcgctctacagggccgccccaatcc

SEQ ID NO: 10946 - DNA, 640 bp, Canis familiaris
  misc_feature (1)..(631): n = a or c or g or t
gaaaatactgagaagctgatctgcannnantcactcatttccacatcannnctgggttacttcagctgtttatcaaacagcaagccatcaacctaacaaaaacacttgtttcaagttgtgttctgcagtcccaaaactgatgttgtagattcaactgaataacatgggaaatgaccaaacaaagacacccagttggtccgttgaatttctgcagttagtgggggcatttctggtcttttcttccacttctgcagaatttcctgcagcaaatacttttttgtgcttgtttgcctccactatgatgtttggataaaaaatgagaatatctcttaaaaaataataaaataaggaacctagaatcttcaactgagcagtcattatgaaaattgctaatggtgccaaggccaaggaaagagtttcagaaaatgactgtgggaaagagtgataacccccagaatgcaaaatcgggagtattacctggtgcttgaacaaggagctccactttgcaactggtttttttttaggacttgtgaggaacgcagcaacaggaaatccatccacaaaggatgcagtgtcccaacttgtactgcgcctgaatagttacatgataatttactgaagaaatctagtgtacttaaaa

SEQ ID NO: 10947 - DNA, 486 bp, Canis familiaris
  misc_feature (1)..(486): n = a or c or g or t
tcagtatctgaactccaggaggacaagtgccaggatccgccggaactnnaagnngnnaggccctacaagctacctccatcaaatcagacactgatccagggaannagctgggaatagcattatcttccccaggaattacagggacttttgccaaaaggcccaggaggtaaagaaggaggagagactggagacagatagccccacaggggtaaatgaaagactactgccactggcctgctccatttggaacaggactggaaatgtctcctgagctctaggttatatgggacccattcctcaccagaatgagaagaaaccgcgcctcagctcttcccatctaacagtacacctgggctgcatgatattcccctaagtgttggacactcacactgagcatctcaccactcctgctactaaccctcctgttcctnnnnnnacccacagtccagcagcctgcccacatccctgcccctgtcaggctagcac

SEQ ID NO: 10948 - DNA, 143 bp, Canis familiaris
  misc_feature (1)..(143): n = a or c or g or t
gcacgtgagaggtgcgcagtgaatatttgactggatgaatgaaatcctgcttgttctcctcacnnggatatcnnnnnnnccttactgggctccaactccacagggaagcagagaagcacgaatgnnnagggtgaagccgacct

SEQ ID NO: 10949 - DNA, 482 bp, Canis familiaris
  misc_feature (1)..(482): n = a or c or g or t
ctacgggtagtncagtnnnctccttggtgacatgcatttcaagtctggagacagtatgtgctgcacatattgggacaacccgccttgggctggctagagtctgtgtaaaagtgaggctggccctgaggctattttgggactgtcaatacacctattagaaagggatgatcntagtgtaaataaagactttggatttgaaatagttcagacacggaagtaccaatatcactggaggcaattttcaaaatgaccctgacattacaagcaaatctaannntttcacacttgagtttattacgtttagtttctatcaatgttntaggaatatttaaaanngttttgcnnnnnnnnttgctcatattgntnnnnnnnngtnnnnnnnntntgtgnnnnnngtattttnnnnnnnnntnatagntnnnnncnnnnnncccaacaacatctctggtgtatggctgtatttcatnnnnnagacccactaa

SEQ ID NO: 10950 - DNA, 210 bp, Canis familiaris
  misc_feature (1)..(210): n = a or c or g or t
cactcaaaagttctaagtnnnggctactgagtattattattccaacaatgcgnnnaagnnnnaataagcacctcatttcatannngccaaatgagcctcagagggccaagggcttgctcaaggtcacacaacccatccccaannngcagggggattcacaccccaactccccacaagaccctccagacctgttaaaagtaatgacgtaaa

SEQ ID NO: 10951 - DNA, 588 bp, Canis familiaris
  misc_feature (1)..(588): n = a or c or g or t
tctnaccttgccgacatctggtcnacagaaaacacacttatttgctccttcctccacagccccaacttttgttcaaatttaaagctagactccccagtacagcctttggtcttctgctattcaatcacttgaggctgagtctttagctttaggtcctcacattattgcttaggccacccacctagtcctggtgttacctgtcatctgacctcactgtggagaagcacctccctggccttctccctcacatggtggaagacaatttggaactgtttccaagggaactctctctcctaatttttccaaccaaggtcatttgaaaatctaatgagttgcattcgctaaatcagacagattttcctttatgatttatagcacatcctgcatagatatcctaactctcacaatagggtatcaggaagttggccatatttaactgttctcagactttgaatcattggcaaaattccttacaaaaaactgatgagacacatgtcaagccctacagcaggggatccctgggtgactcagtggtttagcgcctgccttcggccctgggtgtgatcctgaagtcctaagatcgagtcc

SEQ ID NO: 10952 - DNA, 551 bp, Canis familiaris
  misc_feature (1)..(551): n = a or c or g or t
gtgttccagnntcttcagataaatnnctaccaatatgcnntncttgtnngtgattatnnntnnnctcnngtgtatnactgggatgcagagaaagccaaannngtgaaatttcannaattaaatgttcaggcgnngagatcattcacgcatgtatccattaataagcgtaattttctttttgcttccagttttaagggaaatacacagatttacaaacatgtcatagttgacttaagcgcatgacacaccaaattctgtggctgccatcagaaactttctacagtacatgatccggatgaactcaatgcatgatgactcttcttatcacacttgcaaatgaatgcctttcaaacattgagactactagaaccaagcactaccagtatctccatccctaactgtccagtccagtggtgtgggaagtgaccttttataagacaaaattgaatcgtgtgactgttctttgcagtgaagatgtgtaaataagtgtttaatggtatctgttactccaaaaagaaatattaatannnncttttccatttatttattca

SEQ ID NO: 10953 - DNA, 574 bp, Canis familiaris
  misc_feature (1)..(574): n = a or c or g or t
ggaagaaattagtantgtaccagtgtnnnctctgnngcactttgaaacgtgtaggaataacatgtactttgaattctgcacatttataagtaagtgatctgtcaggatccggatcacatgtgtgtgagctgcactttataaaagggaagggagcagctcttaggcctttgtaacctggtgatccagcccctgatgccaactgtgtgccgtagccctgaagccaggaaccttacccctgggtaaagtctgaccactttaagtattgcccctataacaatgtggctggtattttcacagtctaatgatggatgtgctgctcacggtttataaccacttacgtaaaggctgctgagagagcataagggcattatttgggtacagcgataacttaggtacagcatctggcgttttcctttttgcagactgggacagttttattttgaaagaacataatggagttttctgcaattaaatattcacagtattttctaatgttagtgaaattttaaaacattaatgtatttttggcactatgctttagaacactaattttagttgctatggatttgaagtc

SEQ ID NO: 10954 - DNA, 327 bp, Canis familiaris
  misc_feature (1)..(327): n = a or c or g or t
aggctccagcgggtgtaggcnnttagnacttnnngggnnngnttgccagntnnntccccagtcctctggnnnnnnantgtggtaccctcatgnnnnnnnnntnnnnnaggctccagtggcctggttgtcaatgttnnnaatgggtcaaggatgtnncatgggnnntggcctctagtcctctgtttttgctaaatgaattgttataacttgcaagattggcatatgagtcctaagcattgcttatttaggactcagtcttctgtgcaggttttgggtgttggctgggtgaagggagctggggactccnnnantngagctggctcccta

SEQ ID NO: 10955 - DNA, 338 bp, Canis familiaris
  misc_feature (1)..(338): n = a or c or g or t
gattttaaatttaaagcttacaagatctttgatgagtcacaatacaatctgaaggcggcacaggaccacccttctgtgtgtatgatcattaactctactggcttttggtttgtttagannngcttttttgcatgcctttctgtatttgtccacttactcctnngtnnnnnnnntgtaccctccaatagggagagtgcctgtttcatctgtacatttaagaagagtgaggtaacgcagcatcatgaatactttgaaaagcaagtgtagggcagccccggtggtgcagcggtttagcgccacctgcagctcggggtgtgatcctggagacctgggatcgg

SEQ ID NO: 10956 - DNA, 556 bp, Canis familiaris
  misc_feature (1)..(556): n = a or c or g or t
acatgttacataaataagtctgttgtcaagagcagtgtagagagatttgaatacnngaaaatacaatngaacattangaaatatatcatctcagggcanctgggtggctcagtcacttacgtgtctgactcttgattttgggtcaggtcatgatctcagggtcgtgagatccagctccttgttgggctccatgttgggcaatggagcctgcttaagagtccctctctccctctgcccccccccaagctctccagagacagcttgtgtgggttgacatgcagagcccagggcaaccagaaccccattcatggatttaagacttccatttcccatctcctgggaaaaacaatggtttgaaggttgattgcaggtaccagctctcagatctagctgggaaccagccaaaaaccatcaactatgtaactggcaaacacaatgggggaataccagtatctggatttaccccaaacctgaaaaatctccatctagggtaagcaccttatgggtgacaaactatggcagcagaggtgggaacagaatgacatctcatgtcatt

SEQ ID NO: 10957 - DNA, 514 bp, Canis familiaris
  misc_feature (1)..(514): n = a or c or g or t
taggacaagcaggcatgacttgtggtacggagggtttcagangcggcatttganctctggagagnnntgtacggtctggagaggctcagattgtaaagcatgagggggtcagtcacagacctggggatgaggacaatttctcagatcttagtcatggtcagcaggtgagaacagcaggagcctggatctgtggagtttggccatcattctgtcccttgaaaccagggaagagggggactagagggccccacacaaactgagaacatacgaaatttctaatctgatgttctggatattctgtggcaaagagaggttaagacctttgagccggggacccaatcttctcctcagtgcaatacatcaatgattcacttgtagctgaatattccacctgtttcctgggcaagcacatgatctcaaattctcctgcattgataaatagccctgatacccatcggactgctcagaggaagaaagttgggataagaaatgggagtgcctgggatccctgggt

SEQ ID NO: 10958 - DNA, 490 bp, Canis familiaris
  misc_feature (1)..(490): n = a or c or g or t
ccttgataagcttattttnnnnnnttcaaaaancagctnnaaccatctacctaagaatggtttnnagaattacaaatcatgtttgtaaagcacntagcccggtgcctggctcatgttacatattaaatggaaagaattatttttatattgcatatactgggtatttctgttactaaggataggatctcgtgagtatagtttgattatatatcttggttcttattctttttcttagatgtttatggtcccaggctaatgttattttcatcaccgtgatttcttaaaatgtgatttcccttacaaacctttatttacctgactggactagacagaaagtgctaatcagacactgaaataattcagcttctctatccttgcccatgcctgccaaaattatttttgaaattattaaaatgttttttaaaaattgaaaaattctaccaagttttaagaaactgcctgtatttaaaacatttctttaaatacattg

SEQ ID NO: 10959 - DNA, 628 bp, Canis familiaris
  misc_feature (1)..(628): n = a or c or g or t
tgtgtgtctctgcatatttgagaacannnnnnnnnnatttaagagaagatattacctatacatcaannggnactatgtgcggtccagataggtactgttacctgggacagtgctcttctaggacttcatttatacagagaacaaactgtgactcaaaaataaattgcagtggacatggggtttgcaataatttgcttcattgtcactgtgatgttggatattctcctccactttgtaaaccatcacgaacatcaccaggaggaagtattgataacgggttttggaataggggaagtgatgataacaacctgattataaaaagacgtgcttcttttcgaaaaaatagcctcttgtttggtttctacatttttctacctctccttattatagctgccatcatggcttttaaatggaataaactaagatctgggaatcgagagggaacagcaactgaaggaactatatcagaagacagcaataataacagcaccctgtcatagagttaaagtgtttaaaaagccataggttgggaaaagagtattaccaagacattcaccattaactctgatctgagaatgaaaaaaatctactagnnnctccttttgttatggcttaaagcnttcaattt

SEQ ID NO: 10960 - DNA, 586 bp, Canis familiaris
  misc_feature (1)..(586): n = a or c or g or t
agatgcntaatgtttgttgagcnnaagagaacctgtgaaagtannaatgaccaacagtggtaaaatgttctccccaaaaggctanatgttctnnacnaggaaatttctagagaaatattgtagtaagtcctgacagttgagttttctcttctgtaatccaagttcctgatttaaactttgagtgctaaggcatcctatacaaaatgcatccaattcaagatgactatttcaaataaacacattgccagccgccataccactagataagnnnnnaggccacagctgtcacttcttccttcataatcctttgttttagagtgtttggctgattttgataactgaccactttgcttgttttctttctctttctccactttaaattctcagtcttacattttattttaattaaaacaatttttttggcctgtgaattttgtaatagaataaaatgcacagcatagggaatacaaccaatgatattgtaatagtgttttatggtgacaggtggnngctacactgtgataaacatagcataacatatagagatgttgaatcactatgttatgtcactatatgatggaaacta

SEQ ID NO: 10961 - DNA, 623 bp, Canis familiaris
  misc_feature (1)..(623): n = a or c or g or t
attctnngctgtttcattttgaatatgtccacaggccccaacacagagttggnnttcagtatcagtcagggnctaattgtggactgaaactgagggtctttgatgcagggatttggttactcaagggatggaaagtctgagaagccaaggaagatggtgaggaaagcagagattagcaatagcaaggggttaccgccatccctaggctggaggaccagaagaaaaggcaatgttatcatagcccaccattgaggtctcctggtggaagctggaaccacagtgggcactgaagacaaagagaatatgcaatctctgctggggttgctgcttgagccaaaaatggagaatacataccatgatcttctcttgtgccttccaatacaccatgagtcccaccagcagaaacaaagtgatgggaaaacttgataactacagctttcaggggccatctcctgagatgcagagcagagcaaaggaagcttcaggaatgtatctgagagaagatgggtcctggtccaaccttgaaggagacttagctcttcttctgtcctggacccgtgttagacctggacattgtgctacggtaacaaaacctctttcatctcagtggcctaaaacaacaa

SEQ ID NO: 10962 - DNA, 345 bp, Canis familiaris
  misc_feature (1)..(345): n = a or c or g or t
gagcagctggggtcctgtgagtgnnacccacccnacagagctgccaggacctgggnntgnnnnnnnnnnnnnatnnnnnnnaggggaggtggngnnnngcggtggtgacntctgaccccaccccttcctctgtccatagnnnnnngcaagnnncagccatgacaggcctggccggggtccccactctggctnntgagagcctgtgcccgctnngctgggtcaggnnngaggggacggcctgccaagacagggtnngaggaggggccccaccnggccggcancnnngcancccgaccggtgggtggacnngtggctgagggatggtacgagnnnnnngcttgctgg

SEQ ID NO: 10963 - DNA, 532 bp, Canis familiaris
  misc_feature (1)..(532): n = a or c or g or t
ccaaaggaactgaggtggtggtgccgatgccagcagnnngctctggagggacgccannagtcnnnggcactctgtgccgggaggggacagcatgccacccgcggcagcccccgcggccctcctggcctgcccctcgttcctcggtggcagcagccggacacttgtccctgagagcatccgtcatagacctgttgcccagtgtcgtcctccgtgcatctccacctgtgcatcagctctaacatcgtacctcgggcacgggtcccgtgtgcacgaccgagaccccacttctgagagggagacagggcacaggtacacaaagtcacgtacgattccacgagacctaaaaccgcaagctgttcacatagcgcttgtgtaaggaggtctgctcacaggtagcggcagatgaacccgagcgaccccaatctaacaaataaaggatttcacgtacggtaccccctccacacatggtctagtctgatttacctgcttcctgggtacaaacttttgactnnctctgagtaacagtatttat

SEQ ID NO: 10964 - DNA, 454 bp, Canis familiaris
  misc_feature (1)..(454): n = a or c or g or t
ctagnaagagtagatngaccagaatctgtgaatttggaaatgggccacagaannngnctccatttgaggccaatgttnnnaattatnngagtatgttttaaaatacacaannaaaagttaatgtttgaagccaatgaattgtttattctaacttgaaacaagacttcagtgagaataaaaggagagctactttattttaaaactttgacataaaaataaatgctaaagcttaacatgaacctgtctgcatttttactgagacaagtgtcactcttgggtttttattatgtgtacacatggccacatgtttatgtaaaatttgcagatgtttgatgtttcaatttgcaataaagctattatatctttcaccttgggtggtcactttgtcatacttcagttgtgcannnnnntaagtgatgtttctgtaacannnnnnatacacacacacacacac

SEQ ID NO: 10965 - DNA, 218 bp, Canis familiaris
agaacgcaggctggaagagaagaaaacacggcttacaaacggctttgacattgagtgtcccccaccaaagacagagaacgaggtgtgaacggggggaggggagagagatggtctcgggacaggatgaggggtgactaaaacagccagcagagcgctatatgtctgcccagatggccaggttacctatagatggtggaaaaccgtctgactgcaagatg

SEQ ID NO: 10966 - DNA, 544 bp, Canis familiaris
  misc_feature (1)..(544): n = a or c or g or t
aagacctnngaatctccgaatgnntaatttacagaacagacaaccgcatcattttgtggtggatggagagctgagtagactttactccagtgaggcaaagtcccagtcagagaatcttgggattttaaaagannnnnntcactcagcttttactttagaaaagaaagtcatcaaaacagagcctgaagattcaagatagctgtgattctcccactattctctggaaatggcattcgatttaaggataatgctccatcatagaaataagccttaataaccaacgttgcctcattcagctcaaacagattcatagccaaagcataaggactgatacggtagtctgcggaaaccaggaagacaaaacaacagccacaaaagagaaaattgagagaatgttgcagtctgtaacagaaatattgatccattcacattcctgtgtaagtcattttatgtagaannnnnntacaaattaatattgtannnnnntcattatttaagaatgtacaatgtatttgtctaatttatagaagtaaaatctagatgt

SEQ ID NO: 10967 - DNA, 583 bp, Canis familiaris
  misc_feature (1)..(583): n = a or c or g or t
cgaccgactatccgtccaacatcggggcctggtcattgcctacaacctgcnnnnnnnngatgctgagctggccaagaagctggtnnagagtgagctgctggagatcctgactgtagtgggcaaacaagagccagatgagaagaaggctgaagtggttcagacagcccgggaatgtctcatcaagtgcatggattatggtttcattaaaccagtgtctcagacaggggcccacagggatgctggggctggtcctgtactatgaaaagtcctaagctgggaactcaagaagtgtcagttcagctagagatcttagaagtaacaatgaagtctccatataaaagaaagacttgagtgtcccctgagttgtcgacttcccctttgccccaggaaagtttggatgtttcattggttctcttgctccctgtctcctttacatctgtcatgttccagaaattcttagaataattttcatctgtgatttggaagacaagttggataattcattctgtacccattccaaaggccaggataatgggctgaattctttgtactttggaaaatggattgtgtggtaaagtaggac

SEQ ID NO: 10968 - DNA, 527 bp, Canis familiaris
  misc_feature (1)..(527): n = a or c or g or t
attgaagtcaaagaaaggtgcttngtctttaaatgatatttatcttttcatggtaaagttgttttactcagtgtcgtgtaatttttatttctgggtgctactaccagcttgttaaaaaaaaatgtaaaactgctgcttttttaaaaactaattatcttatatttgaaaatataattaggcatttagtcttagacatttatattatttcttaaaaagtctgacgttttatatatgaaatcaaatagtattgagaaagtttatttctataaacctccttttttacttgcctatgtccctacatcccaagacctgctgtataatactaagaaaagagttacttttaacatacgacattttaaatttctgtttaaaatttttgtggttttaagttgtctcttacagttattatttcactttttttaaaagtaatactatgtgtcttatatttttatattatggttcatattataatctcatatttcttaatagtgtttcattgtgggcagcctgggtggctcagcagttga

SEQ ID NO: 10969 - DNA, 592 bp, Canis familiaris
  misc_feature (1)..(592): n = a or c or g or t
agatggcatgagtgtncntgtagctccccagggcttnnaacgggttccaggcatcttcatctcccgcnnggtacgagggggcctggctgagagtacggggctgctggcagtcagtgatgagatcctcgaggtcaatggtattgaggtggctgggaagaccttggaccaagtgacggacatgatggtcgccaacagccacaatctcattgtcactgtcaagccagccaatcagcgcaataatgtggtgcggggagcatctgggcgtctgacagggccttcctctgctgggcctgggcctactgaggctgagagtgacgatgatagcaatgatctggtcattgaaaaccgccagcctccctgttccaatgggctgtctcaagggcctccatgctgggacctgcgccagggccgtctacttcctggtgcccgcagttctctgccctccctggatgatcaggagcaggccagctctggctgggggagtagcatgcgaggagatggtagtggctttagcctctgatgggcaaggatgcaaccccttgctactccaggctgctgggacatggcagggacttccttggtgggggttttt

SEQ ID NO: 10970 - DNA, 519 bp, Canis familiaris
  misc_feature (1)..(519): n = a or c or g or t
antgcnctcactgacagagagctagaagagtanngcagggaggtagagcggaagcagaagggcccggaagagaatcnnnacgagaccagagaacagaaagaaaagagccctccagagcacgctgctgccccccacaccccccccagcacccctgtcaagcttggggaagacctgccacaggagcccatttccggagaggacagtgatgctgccaccttcaagccaactctccccgacctgtcccctgatgagccttcagaagcgctcggcttccccaccttggaggaggaggaagaggagggggaggcactcagtgaagcccgcgagcctcccagccccactggttcccccgtggcggccagccctgagccagcctcagcccaggtggccgaagaggctgcctccccagctgccgaggagggggctgccgtggaccctggcagcgatggatctccgggcaagtccccttccaaaaagaagaagaaattccgcaccccctcctnnnnnngaagagcaaga

SEQ ID NO: 10971 - DNA, 519 bp, Canis familiaris
  misc_feature (1)..(519): n = a or c or g or t
gaatcgaggtnngccatggttctanncgatctctgttttgcttgggttttgtnnnagtgtaactgacataagtacataaatattaaaaacgttgcctgatgaatttgatgattttgtgcatgtcatataaaccatcacccaccaacatatagaatttatctgctgtctcaataagctcccttgtacccattcacagtcaatacaccacctactccccactggcagtcactcttctgctgatgatatgaggcttcagattctcttcctaatcaagaaaaagagcttatgaaaaattcaaggccctcattctctaccctaactagactggactcctaatccattgtctttactttgctcacaatcaatgtcaccttgcctctaaccgaccgtcaccctatcatcaacatgcccttaatctaattaatctgcactatgttaagtattctccaggcatgagcggcttatgaactgtgacattcttctgacatttagggggcnnnnnctccactgttttattaa

SEQ ID NO: 10972 - DNA, 544 bp, Canis familiaris
  misc_feature (1)..(544): n = a or c or g or t
tcagatnngccagctgtccatccaccgctgcccccnctccgcgtgacanntaccaatcccttnnctcccacaccgccccctccagtagcaaaaacgcccagtgtgatagaagnnttgaaccagnagagcaagcctgcccagcctgggatctcnnngagcaaagccccacccccgcccctgccgccccagncgcccagccgcctcccccagaagaggcntgctcccggggctgacnngtcaaccccgctgatcaacaaaggccagccgagaggacctgcagcagatctnnnnggaacggaagtnntgggtcctctgtccaacannggagtccnnnngcccccagcccccatgcccaggaagtcacagacaaccaagttaaagcccaagcgggtcaaagcnctctataactgtgtggctgacaacccagacgagctgacattctnnnngggggatgtgattatcgtggatggagaggaggaccaagagtggtggattggccacatcgnnggagatcccagtcgcaaaggagcatttcccgtatcat

SEQ ID NO: 10973 - DNA, 609 bp, Canis familiaris
  misc_feature (1)..(609): n = a or c or g or t
catgttggggggttggttcacatgaagcaagagccatactcacccttgcagaagctgcaaggaggtgggcangacccgggggggccaaggtgggggtgnnagnntgaaggctctggagtcagacaccaaaatgtagcatcacttagaaccaaacaaaagagaggaagggggaggagtgtttctcacaggttcagggggtcggagagccacaggccccggaggtcctcctgaaggaaccaatggacaggagttcaaggcctgagccctccaggtccgcagggcagatcctcagcgtgggttctgctggatgctgatgctctgagcttcaggaggtgttgattttaaaggagctccactacgtgagcactggctttcaggatcccatgacctatggcagttcactcattctcgattggtttaaaaagctgggtgaacccccttgggcttgtcaaaaaaagaaggaacggttgtctcagaagcgctgcttttccatattggcggggatttcaacatcatcntagtcatccagaggctcaatgtagctcgggatggaaaccgtcttcttgtttctcactttgttgaccagtgagtatgtgctcgatggctgac

SEQ ID NO: 10974 - DNA, 666 bp, Canis familiaris
  misc_feature (1)..(666): n = a or c or g or t
attggtgaaaagtcnttcaggagatcngtggtangaactccagcatannnngnccctgaantnntcannagcaaaggnnacnnncgttctctagatatgtggtcagtgggagttatcgtctatgtgagnntcagtggcacatttccttttaatgaagatgaagatataaatgaccaaatccaaaatgctgcatttatgtacccaccaaatccgtggagagaaatttctggtgaagcaattgatttgataaacaacctacttcaagtgaagatgagaaaacgatacagtgtggacaaatctcttagtcatccctggctgcaggactatcagacttggcttgaccttagagaatttgaaactcgcatcggcgaacgttacattacacatgaaagtgatgatgcccgctgggaagtacatgcatacacccacaatcttgtgtacccaaagcacttcattatggctcccaatccagatgacatggaggaagatccttaattatcagtgagcctgactacagtaaggaaggatttcattttatggactgatactcctactttgctacacgactgttgttctttgtaggttgtcatctgcaagggtgcaaagacatggggaaatctaataaggaattggtgatacctgtcctgtagttcatcgtgagtaggt

SEQ ID NO: 10975 - DNA, 476 bp, Canis familiaris
  misc_feature (1)..(476): n = a or c or g or t
tggtggcactaaggacagagatgtgcccagctccggactaacaggaatgagatctctnnagcatcannntctcccggtttngtcttgcacttgggagccagacagagctggctggtccagaggggcctccccaggtatgcccctggagctccgtgctcagcgcagagtcccctctggatgcccagggtgggagagagaacaagacccgggcctgaccctgccctccatcgacccgcagctctccagcgccaccctcctgcccccagcagcctgtgcctttgttactggagaatctttaaagagctaaattgggctaacacgccctacagagagtagggccacacagctgcctgnnnagcccccctaaatgccccccatcaccactattgcccgatcacagctccatgaacggagtattacttccctctgatggaggggaagagggagctctgtgcacctcnnncttttcttgatct

SEQ ID NO: 10976 - DNA, 503 bp, Canis familiaris
  misc_feature (1)..(503): n = a or c or g or t
caatcccggccatccaacacccagcatcagtccccaggacctgtcaaagtcagaagcctcgtgccagtgagcctccacccggggctggtcgcaggcccctggggggccccgtgttggggcaaggagaggagagaccagccctctgggatcattatctccaggtgctgattaacccagatgtatggttccagtccagaggcctggtggcgccactgccccttggcaatgccggggcatttgactgttgggcatggtgacctgtgactcctgaaaggtggtggtaactgtgttgggtcccgtgactcaagactgcttcctggtggccagtcctggatggaggccagtcagcccccactctgctggggagatgccgaaggaggacaagccttcccaccctctagagcaagaacaaagtggacagggcagcaggctcttctggaaaggtaatggtggcagaggtgatggagtggtcgacctagnnnnnncttcagcccgggctgctt

SEQ ID NO: 10977 - DNA, 513 bp, Canis familiaris
  misc_feature (1)..(513): n = a or c or g or t
ccaagctttttttttttttttaataattttttaaaattctttttaaagaggctccatgcccagtgcnnagcccaatgcgagacctgaactcatgaccctgagatcaagatccaagctattgagtcatacacttttaacccactgagccacccagaagccctggaaccaagcctctcttgactgcagctggagatggggactgcagggcctcactgggggtggtcttcctttgtagtattgttcatttctacagttagtccacgtggttgctctgggaacagagatccctactaggagaacctctgaaagttaaaaggctgggaaaagacctgaagagaacttggtgtgagccacggggccaaagaagggcagagaagcagatctgtgatcatagggctatggagcaatttgtgccaaagggctggaccatgtatccaggggcctgacgagcccagagggaaagttgcatttctcaacacagttgctttgaactcagttcacatttgagttgct

SEQ ID NO: 10978 - DNA, 350 bp, Canis familiaris
  misc_feature (1)..(350): n = a or c or g or t
ggnnnnnnntgcccacaggtccagcntnnagtcctgggcccagctacagtggtannaannnngtaaatgcccacggaggccnctctgttttgnnagctgggagggaggaggatggtggaccatgggnctgggtcccacatacgggatgcggaggggatgnncttgaaaaggcacttgnnaaacgagcagatgagtgaaataagcccagtttgccgaggggcctttngtgctgtcagcagtcgggatatnnncagaacattgtatagcccccactctcccctgtacatttctccctggtggcgtcccgtccctgcttggggacaggagttttgtagactgtacagaaatcn

SEQ ID NO: 10979 - DNA, 203 bp, Canis familiaris
  misc_feature (1)..(203): n = a or c or g or t
ccctcttgtgcctctgcagatgcaggagagcccagagcnngtngagggccgtgacctgctgagctgtaccagttctgagccgctgactctctgagagctgatgtccggtccaggccccatgaccactatggccctacaaccaagtctgcactgtgaccaggccaggattcctggagcagacccgagaggctcactggtcactc

SEQ ID NO: 10980 - DNA, 660 bp, Canis familiaris
  misc_feature (1)..(660): n = a or c or g or t
tcgcannctaactgtactgaatanncgagatatgtngagacgcnnaacatagacactngnnggcanaggtcgtgtcaatgtttatacagaagatcaggggcagaatttgttaagaagacaggnaggccaccaggagatttgtcttagagctgaagttgctcagcaagaacaccaaattgatttaggctgtattttattcacttattacttatttatctacttcgtgtgtacttctgctggttcgcagggagatgctgacgggaattcccaagccctcttctcaagataccctctgatgacacctaggacgactgatgtcgcgatgtctgaggacctcctcccaggatgtcccattcaggagtatctgggatggaggggaaatattctttctctgtctgcacagccccaggccacacgatcactggagccatgtggggcaccacgtcctggatatgaccgtatacatgtgtgtttgttgcaggatgctggtgcataatatatctggagggggcagggcagagtaggggacagagcatgagcgtggaggggacagggcttgagtttcatctggggcaggagaaaagtgaggttgccaaaggactttatgacattgaggggcnnnntaatctcttatctataaagaggggagatcccttcctc

SEQ ID NO: 10981 - DNA, 389 bp, Canis familiaris
  misc_feature (1)..(389): n = a or c or g or t
accnngtaccattgatgtgttgctacggcttgaaaatgtatccagaggcaataaccaatgaatttacccaatgacagcagcaagtacctaaataatcctcctgagtacagcagttaatgcagaggtttttcaagtgcttagcaggattgtagtatcagccagaaccctggatcacgaagtagcaaaatgagtgcatactaacaaagaaatcactatcaacagaaatacatggataatgaatgttgcatttgttgtttattcgaaaagtaaatccgaatactcagtgctcatttttaaatgccaaagctattatgtttcactgcgatatgtacatttgtttgaaaaatcacctttcaaatgtcagaaatatcaagtcaaatactcttctc

SEQ ID NO: 10982 - DNA, 511 bp, Canis familiaris
  misc_feature (1)..(511): n = a or c or g or t
cagtccactacagaagatatngnctggatttcaacaacgttcaagaagtatcctctgcttgcttcacgttagccaagggctcatgactgaccacttgcagtccaaagtctccgctttacagatggagaaactgaggctcaaagaggatgtgctctacctgaggtcacaagatggtctccctccgcatggatgcctctagttcctgggagctcagccctgcagaaggcagctagggcagcactgggcagctctcagaaccctgttctttctgccaagcaacaatctgcttcattgcaacctcctctccctgatccgtctttgtcactcactcctctgttccatctctcattcattcgtccaatcaccattgagcacctgccttccgccggttgaattcaagaagtgtgtcttgcctaccgagcagggacagctgcggagaacattagatgcttggtgtgaaactgagctccagaaggccagggaccacttccgtgttcccccactgtatctt

SEQ ID NO: 10983 - DNA, 491 bp, Canis familiaris
  misc_feature (1)..(491): n = a or c or g or t
gtgcctcatctcnnnctgcagctgttggtnnagcctctcaaagttgccactgtcagaacccactaggcccacccaggtnnaggnntgaaccaccaactgaacaactgttatctgcttctgggaatctattttaattcaccatataagtagtatcaggttgtattaatccttctgtgtctgtctgtctgtcttttatttttaaatattatctcagcatatctcatcatcatgctacatccaggtccttccttccaaagtctatatgctcaggcctgggaagccagttccccttgagaagccagtgggagaaacagagaagtaaagtgtgctaagtgatttgtttttacgcattgtatgattcttgacatggcttgagaaataaaggttcaggtgaactaaacacttgaataatcatgagaaggatagaaactagatatagaacttctaaagcactggaagaaaaaaaaggctaaaacaattaggaaatttca

SEQ ID NO: 10984 - DNA, 597 bp, Canis familiaris
  misc_feature (1)..(597): n = a or c or g or t
tgctaaagagcatcctgngaaaagaagggcacagactggaattcngtcccaagcgaggagagcgaactcagacccgccgctggctgtgcggggcctatctggtgcaagatctgctcagtccaggaaatccaaggaggtgccttcccactactcgtggtgaaagaaacctgcctccaccaaaatctctggagggaaaagcagcagaaaaggtttgcttctcttgggggactgcgatttaagaaataaaagtgatcaagatatttgcactttgtagaaagggcaagattctttgcttatttctgaaagggggagggtggtctttgctggatgtttggtttgtgaaaagagttacttttgataaaaatctgtagttatttttttctgtgttttttaaattactaagagaaattggtgagttcaatagctttggtattttgagtgcaaatcataatagttccaatgtggaaaaaaatcaaaatggaccctgtctctcaatgttaggaaattgcctaaaatgcagtttaataaatgatctttgttatcaaatggtaatttacatggggtaatgttctgcgaggaaaatgtactgtttttatg

SEQ ID NO: 10985 - DNA, 621 bp, Canis familiaris
  misc_feature (1)..(621): n = a or c or g or t
gaagcactaccacngccccncgccccccaatcctctcttgctgatgatgctgtgaatgggacaggatgtgacagctgngactccaagagccacttcacattgtaaattgcctgtgaagacagctgaaagaatttggatgcccactgagtgcacagctgccctacaatccctccttggcttctgtgaagatggaagctccttgagtatccagattgctgccttcaggtctgataggagtgactgaatgcaatattaacctctccttgactagttttattgttttcccaaatgacaggccagtgtaacagaactatatatgaaacagtatgtgtgatttcagtgctgtttgtatgaatcaaatgtccataaaaattgaacttttttctaaattttatattctaaatcctctaattaatgtatctcataaactgattttgaagaataacctctctgttattgtaccaaacactaatcttgtgttttgaattaatacttaaatttacttttgccttctgaggttcttgtcagtgactcattctactgtctttaaacctccagttaatgtggtaattttaccatatacacttgaattataatttggaagatgtattctttcagana

SEQ ID NO: 10986 - DNA, 522 bp, Canis familiaris
  misc_feature (1)..(522): n = a or c or g or t
gggtaacccacagatgttccctgtaggtcatggcacttctgannnnnnatagagtcgagtcatgcgcatccacacacatgcccacacacaaacatagacattgttgcacagattgtatgggaggttcagcaatgcattactcctctgttttctttttaatgtacacttaaaatacagtattatcactttataaagcatacattaaacctaataaatggaccaataagccactctatcagtattttgtatatcctgcatatgcagacatatagagttaagcctttgtatttcaatattattcaaaaatattcaagatctctttgagtagcttctgctatgatattcttatgaagtaaagaggcaacttcctatccactgtaggagagaattcagttgaaggagtgagagtaatgagagacattttccattcattagatcttgctttcttttgttcattattgtactgtgctgtaccacatttatttcaatattcattttgtattaaaaaattttaaagtgcta

SEQ ID NO: 10987 - DNA, 599 bp, Canis familiaris
  misc_feature (1)..(599): n = a or c or g or t
attgactgnnngcaaaaatccttaaaataaagagaaatttattctaacanngaaaattacactgcaagtgttaatcattagcttgatgcatgctgaaatgtagcttttaaaaagcattttgcattagtactaaaataagccatcaatgccagtccaccctctattcatggctaaatatttaaaggttatttatagcttctttaatgaattcttgcttaaacaaagtgaaattatgtcctagaaaagtagaagctatttgtaactagaacagcacaactgtaaaacttttatgaatatgtattttaataatatgggggtgagcctgaatctccacaagttaatggataattcagaacagaggactgattttgaaagatagcctgaaaatgtagaagatttgttctttagtaaatcttaatcaactgtgcatatacttttagttaagactgtttttctctcagcctaccccccacaaaaatcaaagcaaaccaagagtaccatcgcatatacacaaaagagccctgcctcccagttgctgttcaagtgagccctgctagctattcccccagaaacaaannnnnttgtgggactattgtgat

SEQ ID NO: 10988 - DNA, 110 bp, Canis familiaris
  misc_feature (1)..(110): n = a or c or g or t
tctaaactgatatcaacaagactggaatgtttgtggtatcagggnnaagaggtatcataaaacaacaaaatagagtgannncttttagagnatctatatctgcaatctgt

SEQ ID NO: 10989 - DNA, 537 bp, Canis familiaris
ggagcattcccaagacattttatgtgtcatggctctgttgatcacaattccttgtatagcttgtattttgatttagtttatattctgcttatattctgcttattatgttcttatatatgagaaagcacaagtggacaagaggtcatatgcagtcaaaatgtgtcccaggaagtagcccgcattggtgtgcattacagtattttgcttaatgaaggcctcagttctaaatattgacataagtagttaaatggatattggggccattttatgtgtttatctgtgtcaagttcttctggttataagaaacacttaatttacacatattttaatcctgtgaaagattctagctagatagagaaaagaaagatacttaaccttcaacaaatgttatttttggaaacacaatttttgtcattaaatgttatattatttcacatatataaaacagatgttatgtaagaatgttgtatattttaacataaatccatttagagagattatctagattcattaattttcatagtgcctttttcacat

SEQ ID NO: 10990 - DNA, 522 bp, Canis familiaris
  misc_feature (1)..(522): n = a or c or g or t
aaaatgtttgccatctgtggtgtatacactccatggattagttaaacctgggcgccctgggannactaagatttacctggccgcataacttgagcagaagtcttttgagcttaaacctgcaagctatacccctttcctactgaaaacaaaactctaaggcattgatcagaaatctataataaaagtagacttcatccattaacttcttaaagaatatttccactattgatttccttattttctgaggcacattcctttcctccagtttttaaaccaccatattaccttcttctgccaacaaggggtagcagtgttgcttcacagaggataatttttaataaaagaaaccctctgcttcaaaggcttttgaaatcattggatccctttttgaaagtgaagatgagctcacctgggccccagtggaactgtatgtagtgctgctgttgcatgagcagatgatacagagcgagtggtgaggtttacctggccttttcagtgacctnctagggcttgctctcattt

SEQ ID NO: 10991 - DNA, 633 bp, Canis familiaris
  misc_feature (1)..(633): n = a or c or g or t
tcaccatcagcttcagagtgtannngtctgtcatccangctgtacagaaatcagaagagngnnatccattcaaagcctacctggatgtagacattactctgtnntcagaagctttccataattacgtgaatgctgccatggtgcacatcaacagggccctgaaactcattattcgtctctttctggtggaagatttggttgactccttgaagctggctgttttcatgtggctgatgacctatgttggtgccgttttcaatggaatcacccttctgattcttgccgaactgctcattttcagtgtccccattgtctatgagaagtacaagacccagattgatcactatgttggcattgcccgcgatcagaccaagtcaattgttgaaaagatacaagcaaaactccctggaatcgcaaaaaaaaaggcagaataagtacatgggaaccagaaatgcaacagctactaaaacaccacttaatagttataacgttattacttgtactatgaaggaacgtgctcggtgtcagctcgagcttgcattccaagcttctttttcttaatttggtgttttctcccctcctttccctttaccctcagtatcaagcacaagaattgttggactaaaaaaaaga

SEQ ID NO: 10992 - DNA, 444 bp, Canis familiaris
  misc_feature (1)..(444): n = a or c or g or t
ttcnnnntgtgtattgggtagaagatcagnnnaaaaagaatgagttganngaagctttnaancagggaatgnnaanaaaagcttgtanannctttgagcaaggcaaggggacctgcccatnnnnnngcaaatgcctttaccgccacgcttaccctgnnnngnggctggcagagncngannagccccggaagcagctcagtnntgagggcaccgtgaggttctttaattcagnnnggctctgggatttcatcgagaatcgagaaagccagcatgtgcccagcactgaagatgtcgacatgacagagctcggggacctcttcatgcnncnctctggannnnngtcgtcagannnctaaggagtagatgggttccccngnnnnntgnnnnnnnnngccgagcattccccaancnagagcgtgcagagcttcctttacnnnnnnntga

SEQ ID NO: 10993 - DNA, 562 bp, Canis familiaris
  misc_feature (1)..(562): n = a or c or g or t
aatgtacttaccctatcaaaccttggtaaatatctatgttttgaaatactagtgctgtattaattcagtgaattaaggagaaggatgtgggttctccttgtgtgtcagctccagttagaaggaacagaattgctaccagaataaagatgttaatgaagaagagggttttcaggatccaggtgaattgcattgcagaaagctttgatcatgagcacagttccaggatcttccaaatccaaaggtaaaggatgatagaaaaccanaataaataaaaggaagccagactaatgaggactcagaccttcagacatgaaggtatgttccctccacagatagagaacgctgacctgctgtggttctgggagagatgagaagacacagaattggaaatnnnnnnaggaagtcacagctatcagttcctgcctgtgatcaataacagaaaaaggactgtagtagctttttatattttctccttcttgtcacatagatgtgtttatttgtacttattatctattttcttcctcttttcttcttatccttgtgattttcttnnnnntgtcag

SEQ ID NO: 10994 - DNA, 571 bp, Canis familiaris
  misc_feature (1)..(571): n = a or c or g or t
cggaaccacntgctccgcaccatctcagcccagcccagcgggnntggccacnggcatgatcggacacagagccaggcagatggcgagcagcggggacagcgcagcatgagtgtggcagctggctgctggggccgcaccatggctggccggcttgagccaggggcagccgcaggccccaagtagaacaccgttagtgaggcgctgtggtctccatggtgctagaccagggcggccagccccgccaggaggcttggcctgggcacacaatgtcgactggagacaagcttgtcccagggcctggcggaggacataggccgtgccacacagccctctcacccctgcctcatgtcctagggtctgaggggttccagcttgcaggaagacctgtcccaggatgacagagggaccaggactccccatgcgaactggcccacgaggcactcctagacattttgccctgcattgacctcccagcatcctgacgctgggcctgggcccagcctgtcacctcccatccactagctcaccctgacccccacaggtcccctcccacttggtagcagctccactg

SEQ ID NO: 10995 - DNA, 191 bp, Canis familiaris
  misc_feature (1)..(191): n = a or c or g or t
aatccacttttgacantttttttcagtagggtttttctttggaccatgtttgccttccagtatgtttctgcagtatgtagcagtaattccccatnnttttctcctattacttgttaaacctttcttcccaaaggggtttgtcctccttaaataagccatctccgagnnnnnngtggcagttgttttttttt

SEQ ID NO: 10996 - DNA, 528 bp, Canis familiaris
  misc_feature (1)..(528): n = a or c or g or t
aaactaaatcagaccatttaacgtcnnntcatctgtcagaaatggtctactccagcaaatgtctcatcctcaaggctctgnnnctgagtagctttctcacaagtcaaaattatgagctctctctctatgtgtatacatatatgtgagcatctattaacgtaggattcattaatatttcagtatgtcaggtgaatatatctacaagaaacaagggaaagaggcaaataaccaaagtcagcattatgagtaattcaaggctatgaattgagtcctatgtgaaggtgaagaaccgagcatttttcatttctatttcagatggcttttgttgggcaaagaatgaagactaagcaccaagtatagctcaaatgtccatgtatgtaaaggatgtctcttatctttatgtttcctccgaagacacatagttggcataaggcaacactgtaacccttctttaacaacacaaatgtataaggaaacactctnnnnatcaggaggatggaaaaccattgggggtattagaaaacacta

SEQ ID NO: 10997 - DNA, 531 bp, Canis familiaris
  misc_feature (1)..(531): n = a or c or g or t
ttgtcctccaagattaaagcttagagcttacatatttgaatactcccaatggtgacaactgtacacctttaaggccgaatttgtgctttgatgtcacttttcccatctaacaacctggtttctacttgttatgtctccagttcagctctttatctgtttcctttataccatttacccaactggcaagtnnttttttttttttttttttaatttgttagcaggttattatgagggtggttttggtctgtctttccaattacatcagctccagcggagcaaggacaatttccaacttgtgcatcatggaatcctcagcaactaacacagagcctggcacacggggcagtcagtggctatttattgactaaatgagtcaataagtgaatgaataactgaatagatctgatttttttttaatattccaagttattttgagttaagtctatggagaagaagaataagtaatcaaccttctgtgacatggctaaaaattgagatgaaacactaaatggttctatgcgattcacaaac

SEQ ID NO: 10998 - DNA, 518 bp, Canis familiaris
  misc_feature (1)..(518): n = a or c or g or t
acagcnagcagctcacctacctnnaaaaataccggcccaagcagagactgcgcttcaangagnngcacgcgcacaagaccaagtgttgcgtcatgtagccgggggctccgagcaggcaccccgcgccccgcaccccctgccgcggctcaccttctgtcccggcgcctcggcaccccacgcctgccgggcccgctcgccctgcgtgccccatgccggccccatcctccgtttccccgcgtgtccgtgcgctgtgtccgcccctctggacgcgcgcctccccttcctcctgcccccgcggccctgtccccctccgcgcgtctctcagaggctcagtggggcgcccctggccttcgccctcctgccctgccctcccacccggtccccggggcagctttcctctcaggctcctttgtcagggggcaggtggactttnnnnncactgggcctgacccctcctccacggcctcgcgccctgacctgtccttggcactttcagtgattgggtctggagaccgtca

SEQ ID NO: 10999 - DNA, 433 bp, Canis familiaris
  misc_feature (1)..(433): n = a or c or g or t
cagcttcaggggagatgttgacagtattgtctatttttagtcttcttccaagctctgtcctgagctgtttcttttgaggggtctgtgccactttgttgagtgggatccttccctcctacataaactgcttcacgtgttcgatttcttccttttcccaggggaaagagggactggccttgatccctaaagtctggaaaggccccctcccactccccactttttcttaacaaaactccagctctactgtgtacatatagaaaagtgtgtattgccacctaaatcatttgagtcattcttccagaggggacaaggagaccctccaccttttggcaacacctcagctcttccttctgctattccctttccccacacacccttgatttttgtcctgtnnnacatttcaaatttnnnnnttgtgttgaacttgcttttt

SEQ ID NO: 11000 - DNA, 561 bp, Canis familiaris
  misc_feature (1)..(561): n = a or c or g or t
tctcaaatatacttacatnnaaataagccactgttttggccctcaagttaannatttnctaagtggcatttaattatgtgcatataaatactgatttttttaaaactcactaattatttgatggattacaaaaagcttctatcactaacactgcttgttcatgtaaacctttgctgtaatttggcttagcatgttgcttttatgcttaatcttaatttgatgcaatgtaaacataacgggacttaaaatatttcactgaaatcagaattcatagtagttaatgaagaaatgtggcattaagtattaatggcatgtctttacagtgataaaagaccattctaactggaatttcttttgttaattatgaaattggtaaagtagggtgaacacaataatttcacaagtgttgtgacagctgaaaaagaaattaatataaaaagaagtcagtaatactcatgatgatgaggggccttactgtaactattctcttcaaaagacttggtatctctataaggttaaaaaccaacttttcctttgtttccccccttgtgagattagaac

SEQ ID NO: 11001 - DNA, 454 bp, Canis familiaris
  misc_feature (1)..(454): n = a or c or g or t
actgcttctttatattcctcatgagcaccctgagcatatccnagatttagtgaacttatttgcacaattcaaatatacaagatcggccatcccccccttcctgctgcccttcttcctaattcccatttggctgtcactttacaacccagttaacgccattccagttcctcagagactgtgggaccaatttccccctgggaagagggaagctgatgggtgtgaatccatttgggggccgagaaaggaatgcaaatgtcaaggatgctaatttctgatcttctcaccagggttgcttacagtaaatcctttttaaaagaaagccctgaagataagcctttgtgaggtgaggggggggggggtgtatcaggaaagttatgtatgtgcaggtgccagggagtggcttctgttctagaagggccccacagctcagnnnnnnctcccacatgcctcctcg

SEQ ID NO: 11002 - DNA, 512 bp, Canis familiaris
  misc_feature (1)..(512): n = a or c or g or t
cacaccatgcctgtcgtggcatgccccctgactgtgtgcacacggtgtgatcacaacagccctgagtgcccnnnnnnccaggcactgccacgtgccaggccctgggctccacactgccacctgccacctcctgcagtgctcaccccaaggctgggaggctgacactgttctctcctgacagcctgttagtactcagaggctcaccccaaggccggcaaggagtggaaccaggatttgaacccaggactatgcaactccagggcttgggttcttcaccacccaccacagctctgagcattttggaggagggccagacaaagcatatgctcctcctcctccccagaaacccacctgtgtgctgggctccgacttttctaggcttcaacccccaggtcacatgtaagccaagccccaggcctgtggtaggtgaggcaagtgaggcacttgccttgatgcagaccgtgaggggtgcctgaaaccccggtaatcaggacaaataacatcaaaattaa

SEQ ID NO: 11003 - DNA, 422 bp, Canis familiaris
  misc_feature (1)..(422): n = a or c or g or t
cccacccccaccccccgccnnngcccccaaatgacagctcccgcttttgccgcggcggcgcggcggcagctcccgggaccccgcggcggagccttcctctggcggcagatttctccacgcaaccgcttaaacttttcgcgaagttcttagaggggcaagacgcgccaaggagccgaggacacgtttttctcccgaccaccgcatcccgctgctcctttgcagtagagatgtttccggggggagggagtatccggtagaaaagccgcaggccttgtgcacctcctccccaactttgcgtgcacgggnccacccccccaccccccacttgatgcttgttcgaggccagaaactggagcgggttgcttgtgtatggcgttgtcacagagtcctccgggtgtgtttgatttttatttttccctccc

SEQ ID NO: 11004 - DNA, 605 bp, Canis familiaris
  misc_feature (1)..(605): n = a or c or g or t
tgtctctatgcagccacctgccactaatgtggggtctttgggtgaaaaatgtgcnnnnnngccactanctcagcaatttnannnagnnacaggtgctggttatgaagattcatgtgctagtcatggtccaatgagtttggaagaattggagtttcagccaaattccaaccttgctcttcccacaacccttctgacagcacaagaaaatgatgttaagttatcaggagcagctgaagatattcatcagtaccaacaaaaacatgaccaagaacataagcaagttgaacataagccagcacaaagccgtttaatacgtgtaagaaataaatctgatacttcgttttcacagcaacaaggtggtaaagcagtaccacttaccacttcagagccgtcacctgccatgatgtctgtgacgctgcnnncagtgaaactggagaagtgttctcaatccccaagcattagcaccgtccaggaagacatagagtcctcaggaacagacaccttctgaaagggaagggagagccagcataatatgtgtgccactggttttgaagtcatttttctctggtataaaaccatgtctcagacaattttgggttttgagc

SEQ ID NO: 11005 - DNA, 571 bp, Canis familiaris
  misc_feature (1)..(571): n = a or c or g or t
cannagctggtatgtgnatcggggcnnaaacggctgcctgatggctccagaggtgnnnactgcctgcccaggccccagggcagtgatcgactacagtaaggctgatgcctgggccgtgggtacgcttgcctatgaaatcttcgggctccccaatcccttttatggccagggcagggcccaccttgaaagccgcagttaccaggaggctcagctgcccgcgatgcccgagtcagtccctctggatgcaagacagctggtgaggtcactgctccagcgagaggccagcaagagaccatctgcccgagtagctgctaatgtgcttcatttaagcctctggggtgaacatactctcgccctgaagaatctaaaactagacaagatgattggctggctcctccagcagtcagctgccactctgctggctgaccggctcacggagaagagctgcgtggaaaccaagatgaagatgttatttctagccaacctggagtacgaagcgctgtgccaggcagccctgctcctctactcctggagagcagccccgtgagggcnnnnnctgtagctggtgcat

SEQ ID NO: 11006 - DNA, 561 bp, Canis familiaris
  misc_feature (1)..(561): n = a or c or g or t
accctgctgcagagctgannaggtctccnnnnnctttgatgggtgancttctcctctctaggtnngcccaacctcagatnntagagctgttgccatgtgnnnnngggtgagagtactcaggggagtggagaggtacacaatgaggagaatgtgagccntagaatccagagcagaagtgatctgggaggcccatccagcagtgggaacatcaccagcccaggataagtaagtaactgctgaatccaggaccgaaggaagatcacaagcctagcactgtggaccaattttgactcttatcatcctcattatggaaggaagaggagagcagaaaatcagataggagtctggtccaacttgagactgatacgctgctgggcactgctggnnncggttgctaaaccactgctacaatggctccaccaccttggagcctccccctgcaagacctccaccaagnnacactgctaaanntgcccctactgctnnnannnacatcnnnnnnnacaccggtgnnnctcctcccttcttccgagtcttctctttccccaaggacttttcctt

SEQ ID NO: 11007 - DNA, 645 bp, Canis familiaris
  misc_feature (1)..(645): n = a or c or g or t
gctangagaccggtgtnancatacagtgggtacaacnnnnagctgctgaccagcgtgtaccagcccaccgagatggccctgatgcacaaaggcccgtccgaannagcttacgacgtcatcctcccacgagccaccgccaacagccaggtgatgggcagtgccaactccaccctgagggccgaagacatgtatgcggcccagagccaccaggcagccacgccaccgagagacggcaagagctcccaggtctttagaaacccctacgtgtgggactgagtcggcggccagaaggaggcgggcagatttgggggagggcgctggggacgtggcctgggtgagaagcccactgctctcctacggctcccggcccctcagtggctctggaaaactgcctcagagccagaaggccaaccctggctgccagtgtctgggtgggtgtccccgggaggccccctcacccattccttagtgtttgtggagtccaggagccagtcccggctttgtactccagccagatagtgttcttcttgggtgatggccggtcagtgccaacactttctggagtcttccgagggattcctgcagcctcgagagattgctcaggcgcgtctgtcctgngtcttgctcctctgtgaggagcaaggg

SEQ ID NO: 11008 - DNA, 475 bp, Canis familiaris
  misc_feature (1)..(475): n = a or c or g or t
tataataaaagtaatattgataataaaatttagataatattaaaggaaactgctctgtttctttaatcgtaggcagagacttgatggttcagtttaattctacttgctcctcttacagattattagcccttcatacttgtagcagtgaatattttgattatgcccatggttatctgttttaggctctaggtcataaacttctgcctacttttattatttttaaaagttactattttcttttattgtgagtagtccctactttaaaagctcaaaatagaagaggaattgctgagccctaacagcttgcccagagattacattctgattgcagatttgactatttttcctttagtaactagggctactttatattctgaaattttggcatcatgaaaatgaaataaaatggagaaatatgtttcttaggattctagcatttcctatgatagttcangtcnctgaatgttaaaatgta

SEQ ID NO: 11009 - DNA, 501 bp, Canis familiaris
aagtacggggatgaacccttgcggtccttgcccgagtcggaggatgaatccgtgcagcgttcgtcctacgagctggctttcagcgccctgaagtttcaagatattttggaaacaatattaatagatagctatatcttcccaagtaccacaataccagatcacttgagcagtcttattattgtgatgctgtatgatttccaagacagaaaatttcaagctcgtctcctttctgataatgaagagcccatagcagaagttcaggaagtagagagtcttcttaacagttttaagacgaagttggctgcagcattggcaagatgtcgaatcaaacatgatgccctttcaatttaccacattcttccagaaacaattaggaaccaggaactaagggcctccactttgccactttatgcttggataaatacttgtaaaatcagccctgaagaagtttattatagtttgaagaaaaaaggttatcataaagtcaaatctgtattacat

SEQ ID NO: 11010 - DNA, 628 bp, Canis familiaris
  misc_feature (1)..(628): n = a or c or g or t
acatatatatctangnntccctnncctgntagattaagagtgcatgtgtatctttcnnnnngagagnnnatgtcagaataagaacacccaanntanacaagctacagtaaaaagaacatttactctcttaaattacatgaagttccaaggtcagacaactccaggctgagtcctccgcgccatcagcccatccctcccatccttcgctctgctattttcagtatgttagtagagtctctcacaatcagcatggtggcctcagttccaggcatcacacccatgtacaacagatagagtgaagaagatagtctgtttccttctatgtatgtacctttccctcagtgggtacacatttccggaagcctcctagcaatgtcccatttgtacatcacattcctatttctaaaataatcgtaggcaaagaatacagaattaccttggcaggcttagactaattaatatcctcttcataatcctgaaacacgaacctgatccttaaacacgcacctgatccttaaaccactcaggcctcttatctcttatgaagaagagaggtgaaggtgaggtggagatggggaggggggaatttgcagagtcagcaactggtaataactttaccttcatgtgt

SEQ ID NO: 11011 - DNA, 576 bp, Canis familiaris
  misc_feature (1)..(576): n = a or c or g or t
ataaacggagtgtgtacnnngtcnctaacagaggggctgtagggttcaagaagccgtgtgtctctcagcaggcccaagtgctggggcatgtctgcccccggtgatctcagaactcccatcgaaatagcacggcctcatgtctgtcctcaattgttcttcaatccctcctcatctgcacagccagcccgacctttgtccagaagtggacgtggggggctgagggcgatggaggactgctggcagtgggagccgtcctcttgctgggcaaagaaaaattcagctgggcttgtctccaacagaagcagaggccccagtgtgccatccaggatgacttggcctctccttgttctgaggctgagacaaagggaataaaccatacaaaagttaaagtcttttctgtttagcattggctttctctttctttcttttttttctttaccaagtttatttaaacaagacacttgacttgagggggaaaccatgtaggattcatttcttttagagtagtttagctctacttacagacagattgccctacatgtaacaaaaaaaaaaagccataaaattgtccttggt

SEQ ID NO: 11012 - DNA, 644 bp, Canis familiaris
  misc_feature (1)..(644): n = a or c or g or t
tagactgtgggagaaaatacaaatgtgcaanncagaggggacattgaagtttccaaaatcattgttcctgtgaatccagaggnntcaggagaggccttgtctgtctccagctcatagaatttagtagtatggcctgtgatgtccatatttttcaggtcctcctttgaatgtggtaggaagtctaggaagataagtggtaattttccttttaaatgtttagaacagaaactatcatcttgcctctcttggccacttaagggaaattgtgttacagatatttgctgatcccatgagggtgaaatgataaatcgtgcatgtgcttactcttcagtttctagtactatttactttaaactacacttggggtggcctaataatggcattgtttcaaatctacctttaggaagacgttgctattcatgttggtagatgtagttcagactcctgagtttactactatatccactggtttggggagatacagccattatctgccttttgactcacttccctagaaaaattctttggcagtttgaaaaacttgcatttggcagaaaataattactcccaccaccctcaactgtctcagtgaccccacctctatttctcaacatctctgaaactttctttattttttttgtggt

SEQ ID NO: 11013 - DNA, 538 bp, Canis familiaris
  misc_feature (1)..(538): n = a or c or g or t
tctgtgnnggcccagcannnagactggagtactggnngnnaggctagncgtggtgggcagaccagcaatgtnnaccccaaatccnntgagtcagactnnagcagctggnnngccgagggctcatgnnagcagggctggcaggagccaagtcccccagaaccgccccctgagggcacaaggctggccagcgagtataactggggtggctcggagcccagtgacaaaggtgatccctttgctgccatgtctgcacgacgggaggctggcacccagctgagacctgattcttggggcgatgacaactgggagggtctggagacagagagccggcaagggaaggctgagctggcccggaaaaagcgcgaggagcggcggcgagagatggaggccaaacgcgcagagaagaaggcagccaagggtcccatgaagctggggacccgcaagctggattgaactgtcggtgtgggcgcttgcagctgtggagagcaggcccacagatgtatttattgtacaaaccatgccagcctggccccctggc

SEQ ID NO: 11014 - DNA, 86 bp, Canis familiaris
  misc_feature (1)..(86): n = a or c or g or t
tgctgcacactgagaaaggnctcaggttcaagagcttctgggctcacctgtgcaggaggtnnagaaaggcgnnnnnccgagnnggg

SEQ ID NO: 11015 - DNA, 528 bp, Canis familiaris
  misc_feature (1)..(528): n = a or c or g or t
ctagagtnnattccttatcccttcattatatctattttttgcaacttgnnnnnnnagtttgtttacagantagtcttaggtagtagcaaaagagccaaagaagagatttgtattgctgagctcagagnngcagaggnngtccgtgaacacggagcagtgggaactctccaggcttctccacccgaggacacccaaggtcccttccctgcagcgctccctcctccccatgtaccactgagtgtgcagctggagcagaataccctcatttttaggaatctagtgatgcctcttgcctcagggaaacgtttctttgatggggagtttatgagatttctttttcttgtttatgctttatttgtggtaacgaaagagtgaatgacttccacagccatggccgggcgggccggcaggcagagcggggcctggggctgcagggctgcggggctgtccctggtgcagccgctcctgaggtgtgagaggggctgtggcttttgtgcggcgcgactatgttggtgttggggggtggta

SEQ ID NO: 11016 - DNA, 583 bp, Canis familiaris
  misc_feature (1)..(583): n = a or c or g or t
attgattagcttgttgcatttgttgccaaaattgggtgnncagttatagcttattcaattcccatttgtgnnaattttgaaacaaaaaccaattgtcttacttggttagccattgattaaggcaacagcatatctgcaggaaaatatcttgtttgtagtaatacaccccaatagttggttttactcttgaaatgatttatttcacttaatttgtataattgttatgagtggagagaccatatacatgttaaaagcatgtttcattatatatatattcattttttaaatctataaatgtaagactaatacaactgaagaaatatttttcctaaacaatgtataacgaaattctccacagttaactcacccactgtttgctgtttatgtgatccaaacttttaaagaaattccataaatgtatattttgtattatgtaccattttcctggtccaaagaaaacatgtgaattcagttctaactttaagaatgtacttttttttttaagtctgttgaagaaattgcattcagcctgtgaatgattgcagattgtatgtgagatgaaaagtagaaataatttctagtt

SEQ ID NO: 11017 - DNA, 596 bp, Canis familiaris
  misc_feature (1)..(596): n = a or c or g or t
tttcnnatgatgacttcattgagcttcattgcagcctgaaataaaaatgttgtatgatagatgctaacagtcaagttgcattttgactggaaattttgatatgacctattncttagctcatttctctgtgctctatgggtacatacaaaaatcctgaattctgtttcccaggcagatcattgcaactcagggctaaagtcatccagtgaaacttttagagccagaagttaactttgtcccagtcccacaatgtgaaaagagtgaatagtggcctctttttagccattttcatggctggtacatatctgtacaccttacttttcagaattaatacgcactttcagatattcttatttttattctcttaagtctttattaactttggagaaatgatgcatctttttattttaaatgaagtagatcaacatggtggaacaaaatgataaagaacagaaaacatttcaatatattactaataatttttttccaatataaaacctaaaattcctataatattatagtattttacagttttatgaagctttctattgtgacttttatggaattaagagatgaagaagatgagatattttagc

SEQ ID NO: 11018 - DNA, 576 bp, Canis familiaris
  misc_feature (1)..(576): n = a or c or g or t
aggctatcgagagtgccannggtnncaatgcctatcagcacagcaaagtgaatcagtngaccacaaatgtcgtagaacaaactttangccaactcaccaagctgggaaagccatttaaatacatcgtgacctgtgtgattatgcagaagaacggagcggggttacacacagcgagttcctgcttctgggacagctcgactgacggcagctgcacggtgcgctgggagaacaagaccatgtactgcattgtcagcgccttcgggctgtccatctgaccgtcggcggccctgccttccccctctgctgcgctcaccgcctctcctgacggccacggatccggtgaacgctgttcttgtgctctttcagagtgtcttgtggcgctctcacaacgtggagaaaaggcaggtgactgccctgttctgtgaacggcgcatcccgtcagaggctagtcatcccagcagccaggcctgtgctgccacttgtcttaactctgaacatttcttcccaaaggtgctaaaaactgaaatctgctagtttgaagctttctctctctctgaatgactcagatacactaat

SEQ ID NO: 11019 - DNA, 604 bp, Canis familiaris
  misc_feature (1)..(604): n = a or c or g or t
gtgacatcgaaaaagcctcgtcagaagaacattgtagttttgagcagcctcagtctgcagaacaaggtagcataagagtaaattccttnnncgtttcaaagaaaaataaaaagaaaacgtcaaatcaaaaagcacgggnagcatatgagcaagtacaagctgagcgtgctgctaagagacaggaattcgagaagagaaaacgagagagagaagaagctcaaaggctctataaaaagaagaaaatggaagtattcaaaatattgagcaaaaagactaaaaagggccaaccaaacctgaatttacaaatggagtatcttcttaaaaaaatacaagagaataattaaatcagacatgttcttaagggttaaaatatctgctctctattgagttcttttgtataggtactgtacctcctaacagttaactaaatttgttaacataaaatggattgtaaagctatactaagtataaaatgttcaaatacttttattcttgtgaaagaaaattttctatgtgtgccctacatagtataatttgtttcttattgatttgcctttgaaggacagtggtccaaagaactttctatttgaacatatttaagcat

SEQ ID NO: 11020 - DNA, 602 bp, Canis familiaris
  misc_feature (1)..(602): n = a or c or g or t
tagtaatnntanaacccgaaataannnggcattactttgataattggcatcaagttatttaaaaactcccatccttatgtttcnatacgatacaaatccaaaacataagtactcggaattttatttatatcttcaaaagctaattactatatttgacctgtgttttagggcatcagaaaactacatggcctttactttttttttttttaagattttatttgtttgacagcataagcagggggagcagcaggcagagggaggtgaagcagactccctgctcagcagggagccccatgcggggctgatcccaggaccctgggatcatggcctgagctgaagatagatgcttaaccgactgaaccacccaggcacccctacatggtctcttctttaacctttgtcttttcctcagtttctgggacatctttgggttgagcccaaatattttctttatttcttttgagatataattcacatgccttaatatgcatccttctaagtgtgcagttcagtggtttttagcatattaacagagttgtgcagccatccccagtacctgattctcnnnntccgtgaatctnntctnnnntggatgttttcaa

SEQ ID NO: 11021 - DNA, 478 bp, Canis familiaris
  misc_feature (1)..(478): n = a or c or g or t
accacatccgagtgcagctggnntcngccgactacatcgtcctggnnnnnttcgagcccccacctgtgaccgtcgatcagtnnaacagcgccaagtggacggaggtctcgcacactttctccgattacccccccggcgtccgccacatcctcttccagcacggaggccaggacacgcagttctgggcgggctggtacgggccccgcgtcaccaacagcagcatcgtcattggccctaaggtgaccggggacccggcccggttccccgctcagcccgagcacacacagggccgggagagggccgcccgcttgccctcctcgcttcatctccactgacagtgtctgctagccactcctccgtcctgtgtctggaccaaaccacccgcagcagtgccctccactgaggctgcgctgggcgcaaggccctgctggggagctgctgccccacttccagcctggagcaaacccaccggttggcg

SEQ ID NO: 11022 - DNA, 571 bp, Canis familiaris
  misc_feature (1)..(571): n = a or c or g or t
tgtcancgtcctcctcctnngctcccaccccacaatcctagcaccccccccacacacnttagtttaagttagctggcttcacctttggcctggccctggtgggctgctcttcctaggggaggagtctatttccctgccccctggcagccgatctggccatatgatttgccttgcccagtgaaataagaacagaagtggcaggagtgactccaggcagaagattcaagagccaggacctggttctttgagatggtggaagcgtgacaagatggattcgcaccagcaaacgctggcgatgtccccgtagactcggtgagatgcggcagaaggaaaagtcagacttgaagcaggaggaggactcaatgtgccatcattactggctctgaagataaagggggccaggagcctcagtcgtacaaccacaaggaactgaattctgctaacaaccttaatgaacttggaggtgggttcttccctagttgacttagagacgctttgactttggctgtacaagagcctaagcggaagactcagtcgcttggtgctggacttctgacccaaagannnnnnn

SEQ ID NO: 11023 - DNA, 570 bp, Canis familiaris
  misc_feature (1)..(570): n = a or c or g or t
cgaagtgccctgtgaccaggtgcagnnngnnnaggtnnagctgactgtgctggattatgacaagctangnnngaacgaggccatcgggagggtggctgttggnnnnnnggctgggggagctggnntgcggcactgggcagacatgctggnnaaccccnggcggcccattgcccagtggcactctctgcggccccctgaccgagtgaggccgctgcctgcaccctgatccccacctcaagccccttgccaagcctggactgagcccctgatctcagactcctggccagagccacacccaggtctaccttgaagccttctctgaccgctgaccagccgaacctgccccattcctgccttcccattcccctttgtaccagtcgcagtgacttgccaactctcccaccaagcacatactcagaagccccagggacccctgggggaggggaacagtctggcctgcccccaccccagtctcccactctctgctttgacaatcagtgacccagcctactaccccctttgctcccagtgcccctcttcctgcattggatcacccgctcccatccctag

SEQ ID NO: 11024 - DNA, 230 bp, Canis familiaris
ctgacccctccttccacctggagcacgttcccaccctcccccccggggggccctccacgctgccccgtgccccgggggcctgcctgcatgtccccgccacagggagcccccagccagcccctcctcagccacggagcctgggcctcccctccctcgcaccagaccccaccccccagagactgtgagcccctcggggcagggattcggcctccagggtgggcacaggggga

SEQ ID NO: 11025 - DNA, 528 bp, Canis familiaris
  misc_feature (1)..(528): n = a or c or g or t
cttaagacatgctacatttgaggcagggcccatcttngagctggagcagtggattnnnaaatattccaaccagctcccaccactcacggcttttattctgccgtcagggggcaagagcagctgtgcactgcacttctgtcgggctgtgtgccgccgagcagagagacgcgtggtgccgcttgtccagatgggtgagaccgacgctaatgtggccaagttcttaaacagactcagcgactatctcttcacattagccagatatgtggccatgaaagaggggaatcaggaaaaaatatacaagaaaaatgacccgtcggcctgagcctgcggcacttggaagtagtgcagaaggggagatgtgcagccccctcggaggtgaaaactttgtccttcctgtcctgatccctgcagatctccgccaggggcgctggacgagactcctgcccactcccctaggctctcctgggtgggaatgaatgagttcagtactgcagaaaaagaaggtaaagtgactgctgcaaggaagag

SEQ ID NO: 11026 - DNA, 472 bp, Canis familiaris
  misc_feature (1)..(472): n = a or c or g or t
cagtgggacctggcaggatgggccaccgccgactctgctccccccagctcctgaggaagacgggggcaagaggaccacactccctgcctgcccccccttccccagctgcnntcccccctctttactctctctgttcttggctcccctgtccccccgcctcagttccagagactcggggtggggaggaactgccacaggcctccctgtttgaagccaccccttgtnntaggtgccgggaatgaccgcggtaccnnnnnnnnnggcatctgttttggttttaaccattgtcttattctgnnnnnnnnnnagggagcatatgctgagtctcccaaggcctgtgtctggaggggcactcacttctccagcctgggacccctggcttcgctcaacaccagcccctgacccagcccaagtccaaatgtttacagggagcctcctgcccgtcccacccctccagccgcttggaggcccc

SEQ ID NO: 11027 - DNA, 663 bp, Canis familiaris
  misc_feature (1)..(663): n = a or c or g or t
tacatgncngcgctctcagacatgctgaagcactgcangcnnctgaagganctcaggctggnacagccctatttcagcgccaacgcccagttcttccaggcgctcagccagtgctctgcgctgcagcgcctctgcctggtctcccgcagtggcacgctccagcctgaggctgtgctggctttcatggcccgctgcctgcacgttgttgtgtgccacatgttcaccggggagtccctggccacctgcaagagcctgcagcagtccctgctccgaagtttccaggccgagcggcccgcgctgaacgttgtcatcttccctctgctccacgagggcctgaccaatgtcatccgggacgtccccatggtgcacctggatgagatcaccttatttaaaagcagagtggctgaggagccaccgaacctgtggtggtgacggggacagctannnnnnnnngaagctgtttccagcagccaagcctcccgcctgccactttcacctctgttcgtctcctgggcttggaagcgggactgccctgactggtgggcggcctcactactgccactcaccgcctgcccctgccggacaccagggcccgtcaggtcacaagaggaaggacttcccctctgcccagncnttctgtgtccccannnnnnctcagagcct

SEQ ID NO: 11028 - DNA, 553 bp, Canis familiaris
  misc_feature (1)..(553): n = a or c or g or t
agagaagagttgggagtctctcgntatgcnnngtgaaataagtcaatcngagaaggggaatatcnnnaaatgatgctcggtttctaacagcctaatgattctgtggagcacgggcatcgcacggctctgtcccagtgctgcccccacaggagcattagcgatccttccagcaacgctgtaagaaagcaatgtctgaagaaagaaaggaacagatgcgctttgagaagtagaaaggattggatcgcatggagctctaggagttgcccgcgaggctcccaaaggccccttccgagnnnnagcccacaggcgtccnnntggcngagcacagggggacccgctccagatacactgcacacctnnnncgccctccccactccccctctcttcaaggcttcgagcccaaagaccacaggcagcaaatgcaccccaaattctcttctgtttcctctttccagaactaagggaaggaagcaagatggggctatttgtgtgtgtgcacacacatgtaaagtccctttccttcctgtgactccacagcttctttgaatagagt

SEQ ID NO: 11029 - DNA, 602 bp, Canis familiaris
  misc_feature (1)..(602): n = a or c or g or t
gagtatgagcgtagagtngaacgggatgagaaaaatgaagctcgggctgnntaaatgacttgctgagcgtcccatggcctagctgccttatgtggcgctcacactgtctcctgcatgacgggcggctcctccagctttacttctctctccagtgctgactgctgtgtttagcaatcccctaggattcttgtcagagctccacctctctgtgactggccattcctttcggtgctgctgtcctttttggggggttccttatctctgtatacatgtagctttgccagatatgtacttagtaatataaactgtgttaataaaaaccatttactgtgtgatacatgagattaaaaattaagagcgattagttgttcactttgataagaggtagttagaagtctcccgcaggtgttaatgcagtggcatgaccgttgacactagctaggctgtaacagtagggcatgtgctgctcccggcgtgctccgaggcctgccgaggccacccgggccccgggctcccctaggatctcgctcaagtagcatttgctgtgtagtctctgtgaaattttggcaattttgcttttctccactaatctttaagtgttc

SEQ ID NO: 11030 - DNA, 497 bp, Canis familiaris
  misc_feature (1)..(497): n = a or c or g or t
cgtnctgcatccagcattgtngagctgtcatcaacatnnntnngtntgttnnactgtnnnnntattaggtaaatatnnaagtaaaggcattcnnnagnatcatcatttaaaaaaaaaaattnnggtnctgttttctaannnaatgttgtagaaattcttaatttggatctatttattagtannngtttcagcttttttcngntgccagtgtgttatatccatctnnnncataaaacctggaataagagatttttgttcacgtatgatccnnntagactcttttnnnnttggnnnattaaaatcttnnnttgggggaaaattcttggttatnnngccataagagatcatgtatnnntttgtagattcnnnnnntttgatcctgnntagtnacttgcttatgtttccagaangatttcttgtatnnataaaaannnagatggttggggaggggggctatttttgttcttgatgtaccctgttttannnntagaaatcng

SEQ ID NO: 11031 - DNA, 538 bp, Canis familiaris
  misc_feature (1)..(538): n = a or c or g or t
cccccaatagaacaaaacaaacaataaggcctccaggtatcaagatctcattaggattttctctnntgaatttttttgagcaaaatctggaaaatgtgaaagcatatttagattttatacactctctgaaatgtgattttttaagattcttaaatttgggcctcttatagtattttgaatgagatctaccaactcaaagagaatatttttcacagatatctttaggccttcattagaaagctattttcccccctgttggtacatttggttacctcatttttgctgtttgtttcagattatgaaagcttacaggggtgttttttggaatcatttgctgagtcatttcctcaaatcatattccattgtatcagttaacatatagttttaaatgtacgtattataaatatctgtaaccaaatcatttgaaggcttgataaatttttaacaaagtttgtacattttttatgaaagttactagtaatgctttactaagtagtgcaatgaatttttatttttaatccctgtgcccaattttgga

SEQ ID NO: 11032 - DNA, 589 bp, Canis familiaris
  misc_feature (1)..(589): n = a or c or g or t
tagctccatctcntacacagatactatattngcgatacataatttactcaacatgnnnncattnctcntaagttatgacattgatgaannactcctggcagggacaatgtgtctgttgacttgaacttccggcacccattgactagcaagaaacaggctcagcaactgatctcaaacataagaaaacagattcaatcttacatcatacggtactgttctaaatctgttaatagtaccatctggatagaatgcacactacccagatgtttgttagcacacactttagagtcactttgccgtcatccgtcagtacagccatccatgatttacttcagatgctgtcagaggactaccatctcagccttctgaatctgtaacggggaaaaaaccaccattctccaccatatccaacctatttcaaattgaaaaggttacttttaaaaataagctacggtaatgtacttgctggcactacacaccttgtacaagaaaagcagaggcaagaaaggtatgggaagttagagaaccttcctttactggctctcaaactgagggaagctctatgttgagatgatctctgacgtttaga

SEQ ID NO: 11033 - DNA, 651 bp, Canis familiaris
  misc_feature (1)..(651): n = a or c or g or t
annngagagaagcaacacggtcgcttnacccactgaacatggtcacatccttgcctgggtgttgacagaagcaatatacccctggaaggtgggtagagaatcctaaccaacctgcngtcntctgaaactgagcagaagggtgagaaaaatggcttggtctccttggatttgagacttcggggtcctggtacatctccaaagctgtcatctgggaccccttagacgggacatcggaagggaatggacccagctctagcctacctctgtcctcacaaaaagagtctgccagcaaagagggcttgtagcggagcctcagagcccttcggttttttcaccagataatcagtatgaggtactggagatctggggacaaaagagtcataggtcttgctctccacagggttaaagggctaaatggcaaatttcaggcttcgtgggccgcgtggtctttgtagcatctgctcagctctttcatttcagaagtagcaacgaacaatacataatgggcatagctgtgttccagtaaaacttcataaaaggaggtggccagcccgagggtgatagtatgccaacgcttgctctagaacggacgataagtaatcaatttaattatgatgcctatttacttgtttcatttatgtcagtgttaag

SEQ ID NO: 11034 - DNA, 408 bp, Canis familiaris
  misc_feature (1)..(408): n = a or c or g or t
aaaaataagtgcattctctttcagaggaaacattctcacatctagtgatctggagttaacattgtcttttttgcattctgaaggaaaggagccctgaatttaactcaggtggcaagaaaaaaattcttaagtgtattttaatttatctttctctaacttctgtttgtgaatatgtaattttaagggtgcactacaccaatttagtaaaaaaaaaaaaaaaactcttacactttgcctatataggccttttctcagaatttgtaagttatcaccattgttagcatcttcagctctgataatgaaatgtcttgtgtacagaatgatgagccagtcatcaaaagtgctcggagcggcaggggggcattttgttcagagtctgtatcagannngctcttaagctccatgcct

SEQ ID NO: 11035 - DNA, 503 bp, Canis familiaris
ttttccatatggtctttagtagtacacagaaagataattgttttttggagtgatattttggcatcctgcaaccatactgaactcacattatttgtagccatttctttgggtagaatcctcaggcttttctgcaaagatatgtcagctgcataagagtcttacttctttttccttcctatctgtattatgttactttcttttcttactgcactagtgggccttccaacatgatgttgaataggagtaataagaaagaatgcccttgactgatccctcatattaggaggaaaatgttcaggtttttattaggtagatatgatgttagttgaagtatttttatccgaagttttcttatcaagtttagaaaatttccatctattcttaatttgctgagatttttgttattatgaatgagtgttagatgttgtcaaatactttgcctccatcaattgatgtgatcatctgatttctatagcctgttgatataatgtattatattgact

SEQ ID NO: 11036 - DNA, 539 bp, Canis familiaris
  misc_feature (1)..(539): n = a or c or g or t
atgcataagacagtgcaaattttggcagcactgannaaaatattcttctcaggattaaannctgagattttccagttatnnggtagatgtttaatttgggaaaagtgggtataagaggacaggagaatnnnnagatgagggatcttcctccacttgtttctcactggtgtaaggagaaagatgtctttttgaagctcttgttcaaatgattggaaagcccttaataaaatgaagaannnagattttttttttttctcaagaataaaacatataccaagcactctgtttgtggaatatttgttaacgtgaatgaaannnnnagatttgagttgttctaattgtaggaaaatgttctgatagttgtagggttttattttgttcttctgtttttctttttattctggctcatgggcatagtaggctnnnnnccatnntgaatgtctctattttccacaggatttnnnnaaggtagntgtngggggggtgggtggcttnnatatatacttacataaggttctnnnntagtaaagtagtcattt

SEQ ID NO: 11037 - DNA, 646 bp, Canis familiaris
  misc_feature (1)..(646): n = a or c or g or t
attggtcagtccccctncnacggtgacgatgnnnacgaacncttcgagtccatccgtgtnnacacgccacannatccccgcnggatcaccaangagtccaannacatcctggagaagctgcttgaaagagatacaaccaagaggctgggagtgacgggcaacatcaaaatccacccgttcttcaagaccattaactggaccctgctggagaaacgggctgtggagccgcccttcaagcccaaagtgaagtcccctggagactacagtaactttgaccaggagttcctgaacgagaaggcacgcctctcctacaccgataagaacctcatcgactccatggaccaaacagcattcgctggcttctcctttgtgaaccccaaatttgagagattcctggaaaagtgaggtttccagacatcccccccaatccaccccagctggggagcctgggtcagccagcatggcctgcccaccgagcctgggcagagcaggctgggcaacatcccccatcatcggcacctgcctgcccccactccatgataagcaacagtgtgattgtctgatttctgctgctgctgctccctggtccccaagaggggcctcagctcctgtctggctgggctctcatggtacttctgtgaactgt

SEQ ID NO: 11038 - DNA, 467 bp, Canis familiaris
  misc_feature (1)..(467): n = a or c or g or t
cagagatgaaannnttcatgggcttagaaaagaaaattaaacagatngaaatgagacatcagcaaagagagcaagnnnttcaanagataatacagcagacacaccaagtagtagaaactgagcaaaacaaagaaatcgagaaatggaaaagacttgcacagttgaagaatcgtgaattggacaagttccgcacagaattagactcgatattagatgttcttcgagagctgcaccggcagggagtggttgtgccagttgcttttgcagatgaagtgaatgcaccagaatattactagaaactggcatttcctaggagctcacagaaaggcctggagatggaggattgtgccactgtcagaaggcggctcttgaaaacnnnnnnttccannnnnnttgtccaaannnnnnnnaatacagaagcnnnanttcaaaataaattgcnnnaaagnnntaagaaaaannntatg

SEQ ID NO: 11039 - DNA, 671 bp, Canis familiaris
  misc_feature (1)..(671): n = a or c or g or t
tggcttacaagatcctccttgataccactcccttcctcttctctctctaaactcacacactgggctncnnagggttctccaaacataccagctacctcctgctttctcatacactgctgcttctgactggaatgcccttctcttatctccctggggagtcctctctctacccctaatatgatgatgagcagctagttgatgctctccttgccaggctctgggatcacactgtgtgttcagagtgtgtcctccctggaggtgagctctgttctcctcccagctctaagaggaaacctgtcacactagatgttaaatgagtgctgaagggggctttggcagacatggaggcaggacaggatccaacctgcgaccctgtggctctctcctgtcttatcctatttcccaggtatccttatttggttttgggacagatcagctcatgaggtggtcccattactgggatgataaatatcggttcgagagtaacatgcacagtttcaaagaagagcagaagctcatcctccagctgcaatgtgaggggaagattgttatctacagctgacatgtttctgtcctgttcagcccactggaggccccaggaggctgacaggtagtcaaggggaccacagagtgtcagagagggactggggcttcaagtggaccctggatat

SEQ ID NO: 11040 - DNA, 233 bp, Canis familiaris
  misc_feature (1)..(233): n = a or c or g or t
cagaccccgtttccgggccagcatctgtcgacggccagctcctctgggcaccctgcagcccttgtgcctccccagacctggctcctgcngnngtgtgcattcnnagacccccagtaggccctgcagtgacccctcccccctagccccagccagctgtctgcctcgggccccagnnnggtcaccagaaccttccacacctccctacttcagccccnntggctctcagcaattcc

SEQ ID NO: 11041 - DNA, 579 bp, Canis familiaris
  misc_feature (1)..(579): n = a or c or g or t
gaagtacatgtagnnnggtaaggnngctgaaggtgaataataatattcatctacttttgcttgtactgtataaggaaaaggaaataacttttttttaattgggtgtttgctaacttataattactgttttatacttttcaacatttataataaagttttttattgttaactataaaataacattcagaaagattcagatatctaaatataattatttaaagcatggagaacatttgtataattcattgatggcttagttctaagcattaatacaaccatgtgatgtagtgttgtgcccaaggcttaaaggaaacttggcagtataggaaatatttttggttccctctacttttaaattacttttttgttgaactttcatgggtatttttatgggcagggagacaaaatnnnaatattggacacagtaagaatagtggcannngntagaagaaaagtaaagaggaatataggcaggtattgtaagctgttaaaaattatttctaggggtgcctgggtgcctcagcggttgggcgtctgctttcagctcagggcgtgatcctggagtaccaggattgagtc

SEQ ID NO: 11042 - DNA, 557 bp, Canis familiaris
  misc_feature (1)..(557): n = a or c or g or t
atgcccgctgnngccaaacagggggagcccatgtctgaccaggnnnnnngactctatcccaggacacntctgttccagagtcnggaagggcattccagaaannaggaattaatacacaaaggtatgctgcangagcaagtgtctggggggcggtcagtggaggaaggggctgagttgaaatacagggtatggggccagactgtagagaacacagaaagccaaggagcctcaacttcatgtggagggacagagaatgcctctgaatgtgtctgtgttgcgggaaggcctgatcaagcttgtttgtgacacaaggacagacccatgtgggtggggatgaaagagagaagggacatgtctgtgaaggtaagaggaacctcaggannnagnnngagaggcattttgaaagacnaaatccacagagtttggtgacttctaaatttgaaatataaaggaatggaaaacccaagcctgggaatctaggaaaatcaaggtgtcttggtgtgtcagagaccccaaataggtcaagagctcannntcatcacctcagacctaagtca

SEQ ID NO: 11043 - DNA, 554 bp, Canis familiaris
  misc_feature (1)..(554): n = a or c or g or t
gcntctaccaatacctctccaattcctcccctccccatctcccatcntagtaaacaccactctactctttttctatcagctcagcttttgagtacattctgcttggtaaaatatgtcagacaaagacaaatattatatgatatcacttatccacggaatctaaaaaagctggtatatggatgcactttagcttatctccttatcaacattttcatttaatacacgaaaacaatacaatgagaatcaaagcccttgtgctatctctccttttccaattgtcttttccctgtgctatagtctgaattgtgttctcaataaaattcctctattgaagccctaaccccaatgtgatagcatttggagatggtgcctttgggagtaattaagtttcactgagttcataagactggggacatgagatgagtgcccttataagaaaacatcagagagcttgtggtgtctctctggaccatgtgaggacacagtgggaagatggctctctgcaaaccaggaggagttcttaccagaacccaactctgctgacacctggattt

SEQ ID NO: 11044 - DNA, 643 bp, Canis familiaris
  misc_feature (1)..(643): n = a or c or g or t
taatgcnttccatttaaaattnnnntatatggtattnnctaacttnnnnnnnnacaatgttcnnngcccatcatgacattgggtagcattaactaagttttgtgcttccaaatcactttggttttaagaatttcttgatattgttatagnctgccttcaattttgatcctttattctttctgtcaggtgcacaggattaccttttttagccttctgtcttgtcaccaaccattcctacttggtggccatgtacttggataaaaggccgcatgatctttctggctccactcaatgtctaaggataccttgcttcctttgcttgcatcccacaaactgtttccctcatcctatttactgcagcaaatctctccttagttgatgagattgtgtttatctccttgtaagccctacctatcctgaatggtctgtcattgtctgcctttaaaatccttcctcttcctctctttaaataatgatggggctaagttatacccaaagctcaccctacagactatttcctcagtaccttgcagaaaacaccaaacaaaaataccattttaaaagaggtgtattttttttttcttttagaatgtaagctccacaagagcagggacaatgttttctgtatgttctattgtgccta

SEQ ID NO: 11045 - DNA, 427 bp, Canis familiaris
aacatttaacttgacccagactcaggtgtgggatctgtcttatgaatccatcaactacatctttgcttctgacagcaccaggtctgaactgaggaggaagtggaatcatctaaaacccagagtgttgtatttttaagctgcaatgacatgaactacttttgagtatgtgttgcaaccaagatcttcccactgtatctcacttagttaactgtctacctttgaagcacaccagccaggtaccatgggcaccctcaccagccctttactcgtggctggtgctcagtaaatatttaaattgactggcaggctccgaggtcttacagtgcttacttccatgctgcttcctaaaaggggagttgaaggggctggctcctaactgaactccccattctaccagagatttgacttaactaatccctttccattt

SEQ ID NO: 11046 - DNA, 581 bp, Canis familiaris
  misc_feature (1)..(581): n = a or c or g or t
atttcaaagctacaaagangtaaaaatgtaattccctgagtcaaattttgttcattgtctctagtttactagttttcnnaaatatttccatgtcccaatatacactgagaaatggattgtataacaagacaccaagagacctgaaagcgtncttttttttttttccaaagcaaattgctttgctcttttggggtaatttatggcaaaagagaagtgatttaacaaataccttgggaaaaataagccataaataagcaaaccaggcctgtgagaactatgaacccaaattgcaaagagcttaggcaaatgtgagggttggcacttatttctcccatctgcattaggatttgtccaaattctggatttccataccttaaccacacctaagtgctttggttcatctaactttggcagatgaagcaattcactttaagcaggggaataagtttacatccacaagaaattttagagggttctgaatctactttgacctgcatattgtgccacatatccaattattctcattcaatgccctacttatacaacttctagattattgggtttcaaattttaaagttgtt

SEQ ID NO: 11047 - DNA, 674 bp, Canis familiaris
  misc_feature (1)..(674): n = a or c or g or t
catgacaaattaacattctnctagttacatctgaaaatgaacatttgaaatagataatcctttaagnntcgtggctgaattttcgtggcttttgtttaactctgaaaggttatatatatgcactaacctttttttgatggctgattaggctttaattacgaaaccaggtttcagaggaagcggtctccggcagtgggtcagtagcatattttgaagtagagttgtatactttttcataaggtgtttgggaatttgttttcctgaaataatttattccacgtcgtgacatcagtgaacgcgtctgcctatcctgagtccatctgcaaaaggaagttctctctcgtcccgattgtcagttttccagtcttttattaatttgttttaatctccgtgttggaaaaaaggggtagtgcattttaaattgaccttcatatgcttttaaaataagacaaatctacttgataatgtactttttatttgatctcgagttgtataaaaccaataaatttgtgttactgttactgcagtagtaaccttatgcacacggtgattccatgttaaatgcaaagtagttaggcgactgttttcttagttacaggagtttcgagcttcacttttgtgcagtaaaagcaaaagtaggctacagtctgtgccatgttgatgtacagtttctg

SEQ ID NO: 11048 - DNA, 193 bp, Canis familiaris
  misc_feature (1)..(193): n = a or c or g or t
taaaataatccaaagatgannattttttaaagtaggctccatggtcagtgtggagcccaatacagggcttgaactcacaactcaaaggtcaagacctgagctgacatcaagagtcagacatttaactgactgaggcacccaggtgaccccaaagataactatttttttttaatggatatgaaatcccagnnng

SEQ ID NO: 11049 - DNA, 592 bp, Canis familiaris
  misc_feature (1)..(592): n = a or c or g or t
tctcttcatggggttgtatgcatgaaactggtnnnntatggtgctggccagaacannaatgtactataaaatgctccntcattctcatgttnncttgatcttgagccttcaatattgccatatatgaccccccaacatttctgtttgcctgtctgcctgtagacacattaatctgcttatcactcacctagaacattggcgtccctcagcacaccatttaagaacacatgggcggcaactgatcttatcttaaaggatgtgacaagccacagagtttttctgcaagaggaaaagcgatgttactgagattcatctgatgtgggtttaagaaggaatgaaaaaagaggacctgaaagcaagaagatgactagagtagtggttgaaggggtatgtttccagagccgtccacacattccagtcacacagaggggctcccttgcccaggaataccagaatgtccatgctgattggaaagcagatggctacttggtcagaaactgaacagtccccagcccctttcccagcctttcannnnagggttatgccctcctccctctccagccctgaagaagacgaatacactnnnacagcn

SEQ ID NO: 11050 - DNA, 629 bp, Canis familiaris
  misc_feature (1)..(629): n = a or c or g or t
tgacatcgnnnnactgatagatannntcaatgagnngaagttngatnnnaatgnngcacttatagagaagttaaaacatggtcagtttacgtngcgagacatgtatgaacaatttcaaaatatcatgaagatgggccccttcagtcagatcttgggtatgatccctggttttggtacagattttatgagcaaaggaaatgaacaagagtcaatggcaaggctaaaaaagttaatgacgataatggatagtatgaatgatcaagaacttgacagtactgatggtgccaaggtttttagtaagcaaccaggaagaatccagagagtagcaagaggatcaggtgtgtcaacaagagatgttcaagaacttttgacacaatataccaaatttgcacagatggtaaaaaagatgggaggtatcaaaggacttttcaaaggtggtgacatgtctaagaatgtgagccagtcacagatggcaaaactgaatcaacaaatggccaaaatgatggatccaagagttcttcatcacatgggtggtatggcaggacttcagtccatgatgaggcagtttcaacagggtgctgctggcaatatgaaaggcatgatgggattcaataatatgtaaagaagat

SEQ ID NO: 11051 - DNA, 658 bp, Canis familiaris
  misc_feature (1)..(658): n = a or c or g or t
cnccgagacaggaagactgaggcagagaannnccacttgcttgtgagcacccggcaagtcggaagcgctcagagccgaggtgtttccattcttcatccatcgccaacctgcgcgaaccagtgtgactgtgcgcccgtatggaaggggctgctgtgcgcggctgctcctcagaccacctctactctggttaggatagaaggttctggccagcgtacctgagcgagctgggaaagaacgcatgtccatttcacgctcctccattgctaagaagggccagtccccaagtccactctgtcatgggcacccacagaccagggcatcctttgagtttttgtttgaaatgaactatttagatgttccaaaaccttgggctctcgagtgtacgctctccagcgccacagccctgcgtggctgacactccccgcagggcatggcttatccttgcagtggggtttggaagcttccttccactgggaagcctccatacacggaaggccagcctgcgtcgtgtggtgtgtcgacttgtcccctcactttccctcacccatccccttcaaagtgattggccacgaggagcacagagggtggcatttccatcttcactggctcagcaggcataaatggccacgttgactttacatgaaactgtgtaaaatgt

SEQ ID NO: 11052 - DNA, 163 bp, Canis familiaris
gccctggcctcaccccgagcacgggggccggggccacccaagcactctgcactgtcagagcaaagcactttaaggacaggcttgccgtctctaccccagtgttacggtgggaaggggagagcccttcccagggtgctccagacagctgggagggaggcttgcg

SEQ ID NO: 11053 - DNA, 617 bp, Canis familiaris
  misc_feature (1)..(617): n = a or c or g or t
tacaggngcaccatgctgcggtgcccactgaactttgctggcaccccggaccacttaaagggccaggccactctccccttcagccccctggtcatccctgccttcccggcccacttcctggccactacagggccctcacccatggccacaggtctgatgcacttccccccgtcatcctttgacagtgcccttcgccacagactttgcccagcctcgtctgcatggcatgtgccacctgccacaacctatgcagcaccccactttttccacctcaacaccaagctttaggttggagcttgcagtgctgtgctgtgctatgctgtgcggggtctgaagtggcctgagatgagtaggcactgccaggggtctgggctggagcctgttccccaggagagcttggctgtccccaatgcaggaacgtgcccctgtctgggcagcctggcataaagagggaggcagtgggaaaactgggtttgtctcaaggaagcaacccaagcctggagccccagttgtggcagggccttgggagaagacggtgcctggctggcagctcccagctaggtccccagagcagaagccaggaacgtgccgaagggctgnnnnnctggttagcagct

SEQ ID NO: 11054 - DNA, 580 bp, Canis familiaris
  misc_feature (1)..(580): n = a or c or g or t
ttatattnnnactgaccccccattgccaaactctaactgccatatgaaatgcactgtctgtcctagagaatgtctgtcctgctcacatgtggccccttggccctcctccacacatagcggcacaatcttttgcacaatcggtgtatttcactctgggcagaactaatgctacttgctcactcacgccaacaaaactaatgtgacggcccagcgaggacagagcccacgtgcccgcctgcccctggccttggcctctggcagggccgccaggctgtgccttctgcagcagatggaagcacgcacttaacctcctgctgacgtctttaatcacactagatctttaaaaccagcccctttggaacaaatgcctgaggaatccggggaataaagggcccttgtgtgtcacctgcatctcctcctgtgtggtctgcagtggtcacggggctgatgggtccacccacggccaccacctgctccaccaggctcgtgctgacactcctcgtggccggggtgtctctgtctgcgagtcttgaaaaagagaactctctcttttcttaaaaatggcctgggacacaacatt

SEQ ID NO: 11055 - DNA, 480 bp, Canis familiaris
  misc_feature (1)..(480): n = a or c or g or t
aagtannnatcgttcaaggtggcgggtgaggcngnnnngtacaggctggtcctgggggccttcgtggagggcagcgcaggcgactnnctgtcatnccacaacacccagccctttncnaccaaagaccaggacaacgactcaactacggaaaactgtgcagnnnggtacaaggggggctggtggtncnnnaagtgccatctgtcgaacctcaatggtctctacctccgggggccccacgacagctttgccaacggcgtcaactggaagactgggagaggctacaactacagctacaaggtgtcggagatgaagctgcggccggcctagcatggggcgctccatgcacacggtggcctcagggaggcggtgcgggcgctgtcaggggagggagcatggggtccccaccctgctccctgtgaagccctgtttctctgttccgtctcctgcacttaaggccctgcctcccatccccnnnggtga

SEQ ID NO: 11056 - DNA, 570 bp, Canis familiaris
  misc_feature (1)..(570): n = a or c or g or t
caccccataagcagcccatcctnnnnnnggtgatgatnnnngngccccagctgnnaccctgnnnagactatgaagagccacaaggnnnggcccatannntttagctatcctggtggcataaatgactcctcgnntgtgaagcatggtgatgaggtgnntggatgctgtggagtctnnnnnctgtgaagtcagtcatctctccatgctgtagaagcatnnatgtttgacctttcctctcctgcttgggtgtttccnnctgtctcctncgcaaccacggctgatggctgggtccaggtgggtggctggaatacatacagccataagcccacttcttcctatttaaattgtatatctagcttttgtatannnagcttttgagtctcaacaaaagtacctatttttcctgtagcagannncgccaggagcaaactggcagaattttctttttaattataggcagggatcagagtttgaaataaaataaaacactgtcagggttttggacacactgtggtgggttatgtcttctnnnnnnnttaggctagaagtagaccagccttcagagaggat

SEQ ID NO: 11057 - DNA, 586 bp, Canis familiaris
  misc_feature (1)..(586): n = a or c or g or t
caccctgacgtggtgagcgagtcccnnnnnnccaaggtgatcgtctcggtnnaagacgccgtgcccaccgtcttctgcggcaagatcaagggcctctcgggggtgtccaccaaaaacttctccttcaaaagagaagactccgtgcttcagggctacgacatcaacagccaaggagaagagcccgtgggcagcacggagccccttaggaaacccgtcaaaaaccggagcataaagttaaagaaagtgaactcccaggaaatacacatgctcccgatcaaaaaacaacggctggccaccttttttccaagaaagtaaataatggctttttaaaatttttatgattataatatggggaaaggtgcattggttttataaaaaggcatttaagacaaattatctttgttaattatttgggggagtagttgggaagtgggaaggcgaattggctctagaggccctgtaagctaggatcgttttcttttttaatttttgacttttcacaaatgagtaaataagagcaacctatttttcaagcagattgcacattttttgcagctttaatggaatattgggtgaatcagagggg

SEQ ID NO: 11058 - DNA, 619 bp, Canis familiaris
  misc_feature (1)..(619): n = a or c or g or t
caacaccatgtgattaaagatttcttttttannaatggtgcttagcatacattgtgattgtgccttttatttctaagaaaaattttgaaaatttcaaaaaaaatttgaaaatgatatttttcaaaaagatatttgaaaaaaaatttgaaaaatgaaacaatttcaaattgataatagaggtatcatgatctcccaaaaggttttagtatttaattgtagaggtgggaagtaaatctaaattgtggcatcatgatgattcttcaaactaaaaatatacagtgactcatatttcatagtagatatcatgcttttggatccataaaactttatggtaattatcaatgtgtgatttgttttgttcacaaaatcaacttcgtataagcctcttaattcaaaagaaaaatgaagttatatgtagtatttcttggtagtacttgatttgtgtcttaagttccaatataaagtattcccttttctttttcttttttaataaatttattttttattggtgttcaatttaccaaaagtattcccttttcttcatgtttcttttttgtatgcaaaacaattgttaaatgtcatgcaaatgtattaggcttcagtattctgctttcaactg

SEQ ID NO: 11059 - DNA, 546 bp, Canis familiaris
  misc_feature (1)..(546): n = a or c or g or t
attaaccagggagtgactccacttgcagctgtgtgtgtgtcacattggtttcattgcttgagtaaatgaatagatnntctggtatccggtatgcagccactgatttgacaaatgggttttcttcatacctgtcaataaagaccaccagaagcagtttgcttttaggtggaagggccagcaacatacaatttcactggcctacctcagggacataccaactctccagtttggtggaagccaccactgaagccacctggcatagggtttttctttgttgggaggtatttttgttactgatttgttttcctttatagttataagtcttttctgattgtatatttctttgtaatttagtcttcatatgttttgtgtttctaggactctttccatttcatctacgctgtccaattgggtgacatgcaactgttcatatcaccctctaataatcctgtttatttctgtagaatcagtagtaatgtgctcatgttggtttctaattttagtaacttaagtcttctctgcctgtgtctctgcctctctctgtgt

SEQ ID NO: 11060 - DNA, 603 bp, Canis familiaris
  misc_feature (1)..(603): n = a or c or g or t
catgcattcccagaaaatgctactnnaacgtctacttnnnnagttattttgttttggtacctttttctttttctttttttaaagagaaacaaaatgttatatgcttttggcaatggatacaataaactgtaatggtctgtaaataaataaatattgacttatgcaatttatgtaaataagtgttctgggagagtagatggctcagggttttggcgtgggcattgtcctgttgggcattagagcaagtgggtttgcagccggttcttgtcataagagacccaaagcccattggatggcagctccgagccactgtgggatgggtggttccaggtttcacaaacagatgttcagatagccaaaccattatcttactggtgccagtacttgcaccttggtcagagacttaatgggcacagactgaaccaccctcccatctgtcatgtgaatgtccccaggcagtgtgaaggacatgccaggtcagtgttggggaacttgtccctgccaggtcctgttctgtagataaatgaatggctttagtnnatggtgttttccttctatttcnnntcatnnacacnnnaacattgtgttannnnnttgataatc

SEQ ID NO: 11061 - DNA, 589 bp, Canis familiaris
  misc_feature (1)..(589): n = a or c or g or t
ggcatgtttcnnnnnatttttaagtttgatnnatgnctcttttaatattaaaaactatcatggggttggttggttttattgttttatttttttttnncctccaccnttggttggggaaaaggnnctgcaagaggttcaaacttggttttactcaagggtcaggttcggcctgactttcagaaatgggttaagctggaaagttttgtttctgtctcaaacaggtcatcccagaaaagatttttttttttttaaatctcctaattcatcctctttccaaaccttagtcttgtttttacagaccacctgacataagtcccttcactctgaggtctggtgtctcaaacctgatgtggaagtgcgcttcctattggatcacttcacccttccttatactttcatcatccttcctagcttgttcaccaagtggcttggaacaccacttcattggtgttccttagctttctttaaatttatactcacggccaactcaaaaaatcaaacacttgtgaacacacatggaaaatagtaactggtcctgtttggttgcccttttttgtctgttttgctcacaagccatactggtctgatt

SEQ ID NO: 11062 - DNA, 593 bp, Canis familiaris
  misc_feature (1)..(593): n = a or c or g or t
cagtnnattatacaaatattnngnctgctaggtgcacaaataaaaatgtgtatcgatnnaaggccaaaaccatgttcagggtttatggncaatctattctatgtaaagagtttaaagtacaattgttttagagtcagagaatagcataaactacacaggtccccttgcttcgtgtacacacacactgatagacaataagggtgtttagttttgtaatattatttgtgctatttaataacttctttaaatattattcaattgtatatacttttattacttttcttttaaaattatagaaattcttcttcaacatgactgccaaatgtaaagaaaattttctttctccaaaataatgtcaacgtatactgaatattggtggttaattagttttgttttgtgtagtttgacattttgatgatttactatgttttccatttgtattgtacataaaatttcctaggaatgcactttttttcaaagtgtaggtttgtggatagattttagcatgatgaaactgtcattacggtgaatgtttgctccatgagaaaataaactaaatgtagttagtgtattaatatttaattggatattga

SEQ ID NO: 11063 - DNA, 455 bp, Canis familiaris
  misc_feature (1)..(455): n = a or c or g or t
gtagacagaaaagaaatgtcatccagacagaaaaatacaccttgaaaatacataatcaacaccattgaggacaagatgaaaaagcagaagctatttgagaaaatggttaggcgcaatcattcccagtattaggttcacccctggttccatctgatactagtgttaggtcagtatcctaggactctttcttgatatatcctgtnnnagatttccaaccacattttgatgaagacataaaccatgtgattttcaaattggcagatggcaaacaaagtaaaaaggaacagttttaaaatgcgttagattacaaaacttaaaaataactgaataaacaataagtaaagtcaagattaatttcaacagcataaagcaaatttctaaacttaggtctaaaattgaaatattacaaatacgaaaagagtcacagtatttttaatagctggatgtttttgatg

SEQ ID NO: 11064 - DNA, 624 bp, Canis familiaris
  misc_feature (1)..(624): n = a or c or g or t
gaaccccgacnnatactgtnnnntcggtggcaccggagtgtnntgtncgctgggtattaaaaagtaatgtctccccatgtggtcagcccttgaagtcacaacaaaaatgctttcaacaaattgggcaatgattttgtggttcaggtcactggctttttggaagtgcacaaagtgcaaaggcattcatgaaaatctggtttaatgagctataattacatgaagtgcaatggcgagttgataacctggagtttatcttctaataagttatgctgggagtcgagctgtgacattgtttggatcgcttagggtctgaatgaggataatggatatgctgtgctcccccttcgtgggcctgagtacctgccgtggaagctagggaagggggctgggagactgttggagagggtgaggcatggtggacatcctaactgtgccctgtcctgcctcgcatgccttcctgccctccagtgccttaaagtatgcagacatttagagcctcaatgaatcattcactgtaacactttgctctactgatcctctgtgtgcaaggggctttctctcctttttggccctcctgtggcagagaaaagatgagttagcttgatgaattctaatgctttgctt

SEQ ID NO: 11065 - DNA, 436 bp, Canis familiaris
  misc_feature (1)..(436): n = a or c or g or t
ttttnnntagannnnctttctnnnnagtttctgtccaannnnnnnctgccctcctnnnnnnttttcagaagcttcccanccnnnntaggatntctttcatttccttggnnnannnagactctactcttctctcttacacccctgcccccnacgtcttacataccttnnnnnatttgccatattctgctatagctcatagtnnncagaggctttgactttcattgtcctcnnntggatagaccatcctgtctggcacctagtagacactcannnaatacatgattaatggactgggtcatagtcaacttttcttctctgcccttttatgtatacagagagttgagccaggtagnntagtatggtctatcagaggnnataatttcttgtatttagcacacaacttatactgtgtgatattatttataagctctggncn

SEQ ID NO: 11066 - DNA, 581 bp, Canis familiaris
  misc_feature (1)..(581): n = a or c or g or t
antcctgtgggggggnngcaggcgtgatggtgtnnaggttgtcactttcccanntccaggcatcctggactgaagggcttcccctcttcctaaccgtagcatgaacccccagtttccctcagcctgtcttgttccctgttcaacccactgaggggcttcccacccctatttgtaccaacaaggtgtacatattcttcatagatagtagacaaatctcccaggcccggtcattgtaggagaggtcatgagttctaggacccttctcctcccccttatttattctcatctccatcttcaccccttgctgtttatagtgcttttgtgtagcaaatgctccctccccgggcttaagggggtccctgcagcagctacaagctggaggttccctgagtttggggggtgtggaagtactatttaaccgtcctgcttggctggtgtccttgtcttttggtgatgttgtgctaataataagcagtacattggggtttatctctgtggcccgagaaccaaggggcctccacagcagctggtccgggggtgatcactggttttctggcacnnnnnngccaggagtgcctggc

SEQ ID NO: 11067 - DNA, 444 bp, Canis familiaris
  misc_feature (1)..(444): n = a or c or g or t
gctgttgctcnngccccccagnaggttccctgtggaacagacctcacactacagggtttttctgccctccacccatccctcaccccagatcccaggctcagggcagtcccacactggtgctcagctctgaccctccagaatttgagggtctctgggggaggaggttgcagccctttctagagagcagcaccagccacctggtggaggccctggcagggcttcagcagctgtttgtgtgcctggtctcactgggctgcaacagctgctccagtgctgatcccattcttggaggccttggaggctccccttaccaaccccatttgctcatgaggttgctggccctccagggtccccactggctgggtgtgggggcttccctgctgcacaatgcccagagtagggcctgcaggcatctggtcctaacccagggtctcccagaaatgt

SEQ ID NO: 11068 - DNA, 622 bp, Canis familiaris
  misc_feature (1)..(622): n = a or c or g or t
cctgctcccctcccccaccatngtcttcntggccatgnnaaacctttccctgagccagctgtcccagaagccacagtacctgtgtggaaatggggatttctttgaactaaaaccagttcactggagacctgggaatggggtgaaggtggaatattttctccctggatttttaccagtctcagaggattccaaccatcactttggaccaccaagtcttgattggtgttgccagttgtcctccttccagggagggattttgcagctcttgggctgaaaggaagctgtgtgtgtgtgtgtgtgtgtgtgtgtgtgtgtgtgtgtgtgtgtgtggtgtgtgtatcacactcatatgttgtcctctgctatctttttatttagattgggggtgcagggaggctgtgggtaagggggaagagggggcgggacgggttcattgtctctgaagtgagagcttccttttgctttctgtcttgcctgagagctttgggtctggaggcctgaccaccaggccatgagctgcccgagtctgaaacctgaagatggtgggtgatacccaagccgccacagcctttttgtctctggggaactgccttcttcagggagaaggaggtggggacggtga

SEQ ID NO: 11069 - DNA, 114 bp, Canis familiaris
  misc_feature (1)..(114): n = a or c or g or t
ccagaaacagaagacctatgnaannaaagttgtatntgnnncaaaaacctctaaacataaatgttgctgttttattattnnnnnnnccggcacagtcatttnnncnnntcatta

SEQ ID NO: 11070 - DNA, 465 bp, Canis familiaris
  misc_feature (1)..(465): n = a or c or g or t
ggagactacagtccacctgctcatnctcgtagctttttaaaaaaatgaaagtaaaggaaaaaaaaaaaagataaaactgcaaacctagaaaactttttagaaaaaaactatttaaaactgtcagatcctgaccagcgcccacccagcccccttccagtgattccgtgccttgagtgtgtctgcgtgtttacacccatccctctgctggctaccccccgcaacccatgcgggcagctcccctgcccttccccgccctgccctccacagaattgggttccaagggctgttccagacaactgccaacatcaccgagggccccatcccagtggtcctgggccctggctccattaannnaaatgtagctctttagcgctnnnntaggaaccgccgctgcctgctgagggccatgcccctcatgcccttgccccaggnntgggnnnttcagcgttgaacacttccttgctt

SEQ ID NO: 11071 - DNA, 595 bp, Canis familiaris
  misc_feature (1)..(595): n = a or c or g or t
gacgnnatagatgcgaggtgggcacgtgtcagacccagacccacagcttgtctgatcctgagttgggttcccaaatgtgagtgtgtgtgtgtccgtgtgactgtgtgtgtctgtgtgtctcaccctgagtggtggccccacgatagaagtgtctcaggtggagagagaaactgaaagatggagactccccaaattagcgtgtctcctctccagtcaccctgagagcccctgagctcgatccagagaggactgttgaaggctctgttgccaaagccatggcctttcctcggtgtcggaaggctcatgccaaggagaaagggtgaatcagaggctgccttccggtgtcccacgcacacgcctttctgaaacctttctccagccagctaccgcagacagaagacaacacgtctggaaagatgaaagcttgtttccagaaccagtggcgcctgcagccatcaggtccacctgcctccagccgagtgcctggcatgggccctctctgtctccccgaggtgtgggcgccgggcctgccttcctcatcacctagccatagcctcgaacctgtggggaaggaggtcttctccccgccctggag

SEQ ID NO: 11072 - DNA, 522 bp, Canis familiaris
  misc_feature (1)..(522): n = a or c or g or t
cagaagctggaggccaaggtgagngagctggaggccgagcttgatgcagagcagaagaagcatgctgaggccctcaaaggggtgcggaaacatgagcgccgggtcaaggagctcgtgtaccaggctgaggaggacaggaagaacctggcccgcatgcaggacctagtggagaagctgcagagcaaagtcaagagctacaaacggcagtttgaggaggcggaacagcaggccagtaccaacctggccaagtaccgcaaggcccagcacgagctggatgatgcagaggagcgggcagacatggcagaaacccaggccaacaagctgcgggcannnnnncgggatgccctggggcccaagcacaaggagtgatgcctgagttcctgggctctgcagacaccgcctcttcacgcagtcagccccaagccccgctgtccccagaataaatgctcgcgtctgcagctccagctggctgccttctccttctgtgaggttcaggagaagaaaggaacacatggtccttgg

SEQ ID NO: 11073 - DNA, 435 bp, Canis familiaris
  misc_feature (1)..(435): n = a or c or g or t
gaattataaggtgcttnatctcagacccaggagttttgggtctcctgctagcatgattccggtaggatcatgtcacacctttcattgttcttgacagtactgagggaattgaaaagggaaaggaaagttgtttcagcaaatggcactggatcaactggttataaatttgaaaaaaaatgaacatcgacctatacctcatcctagatgcaaaaattgacgtaaaagatggctcacggacccacatgtacaacatgaaagtatgctactgatatgagaaagcatggaacttaaatcctgcagcctggagtaagacacagcaagtcatatcaaaaaggaaaatatggactaataggattttctcaaaataataaactttttcttttaaaaaaacattatagggcagcccggtggctccgcagtttagtgccgtcttca

SEQ ID NO: 11074 - DNA, 535 bp, Canis familiaris
  misc_feature (1)..(535): n = a or c or g or t
tacagtatagaaatgttaaatgaaaaaggacattccttttcacagtcntactcnnaagtaataattggtttgctannnttccagacttaagcatatacatatttaaacaaaatgtgttaatagttgagactctggttgctgtacacaggcactgttggaagcgctttaccatggattaacccttaatcctcacagcaaccatatgagaatccttatttattgtggggaactcatgccctgtggcttagatgagtagatgaccaggtctggccttcctgagtagtcctgcagcttcttagccacagtgattaaagaatgggcatgtaactcaagccaggcaaaagagagctctcaacagaacttctgctggaactattggaaagaaggctctacagaaatcccacgaactaaggactgtagcctgaatttatgccatgtggagagtctgagaagaaactcagagattagcagaaaggaataagaactaagttctgatgtcatttttctggaggccctagatccagctgtgcctaaa

SEQ ID NO: 11075 - DNA, 495 bp, Canis familiaris
  misc_feature (1)..(495): n = a or c or g or t
gtggtgacttctgtcnnncccttcattaggattttttttctttttaatctgcataatggaggtacaatctgcatacagtaaaatgtactcgttttcactgcatggttcagtgagctgctacagatgtgagnnncatgtaagnnnnnncccaaggaagatacagaacgtttttctttatcacaaaaagttttttttttttttttcatcacaaaaagttctatctttgcgatctctccccagtcctcggttacaactgacctactttctgtttctggagctcaattttgcccgttgtagaacttcttataaattgaaccagatagtgtgtactcgtgtgtagggtttttttttttttttagctcacatgttttgaaattcctgctattgcatatgtctgtactttgttcctgtgtgtgtgtgtgtgtgtgtgtgtgtgtttgctgttacactggcgtgtatcacgattcctttatccaggcacctgctgatggatat

SEQ ID NO: 11076 - DNA, 447 bp, Canis familiaris
tcctccatcaacaagatgccccttcctgatgggaggaggttcggagcccaggcctagagaacgagtccgcactcgttggccaggacggggcagatgtactttccacagcttcctctgcatgttctctgtccagcatcaatatttccatgttcgggatgaaacagagttacctaacatttaaaggaatgactttctcctttcaaaacaaggaggaatgtgcagtatcaaatctggattccagaaaccctggcacaggacgaccctgtgtcccaaactttcttgccaaggttccagtttatgcccatgaggcccagagaaggttccggatgtggcggcagcttttggctctgaatggttttggctgcaagaactacccggtgactgatttactcctcgatttcgagtcttttttccccccctccatcaaaataattctccacgaatcat

SEQ ID NO: 11077 - DNA, 492 bp, Canis familiaris
  misc_feature (1)..(492): n = a or c or g or t
cagctgcagctgctgcatgcaggagggtgangccattnnagcccaagggggnactgagcagagacagaactccagggtctgtgaggccagcagctagctggagtttcaatatcccaacatctccagctctgcaagcagccagaagcatgtcccagagctctgactgatcaggggncttggcctcatccagggaaggccccaaaggggctgcatgtgcctgggcggactgtgagaaggcctcatctccttgaggttgctggggaagagtcacatgcaccccggcttccaggtcctggcttctctccttcttattcctttttctccttctccgctttggcaatacctcaaactcacgaagatccagggtccctactgtcaattctactagctccagctccacctgaaagctgtcctctccctccgaccctgaacctagggaaaaatacgatgttaggtccatctaaagaaatnnncagagggtggaaggatgtg

SEQ ID NO: 11078 - DNA, 337 bp, Canis familiaris
  misc_feature (1)..(337): n = a or c or g or t
gtggttgagcatttcacactggaaaataggctcccttcggacnaggctcccttaggatacggacctgtatgtccttngccatcgactcccttctcctaacaaccctccatttcccacacgctctgccccacttcccatgctcagggtgggtgcggtccgtggacacccagtaactggtggtgggactctgngaaacagaaccacgtctgctgtctggggcaggagaccacagagcaggatctcggccagcctctgccttaaaggaaatctttattaattatgtatggttcacagatgtccttttaaaaaccccaactttctagagaagcacaatcct

SEQ ID NO: 11079 - DNA, 484 bp, Canis familiaris
  misc_feature (1)..(484): n = a or c or g or t
ccaaggatgatgagatnnannnagatnngcangaaaagaaagaagttnnnnnntgtggctttctccctggaaatgagaaggnnctcgnnnnacttgccctggttaagccagaagtctggactctcaaagaaaaatgcattctggtgatcacatggatccagcacctgatccccaagattgaggatggaaatgactttggggtggcaatccaggagaaggtgctagagagggtgaatgcagtcaagaccaaagtggaagccttccagacaaccatttccaagtacttctcagaacgtggggatgctgtggccaaggcctctaaggagactcatgtaatggattaccgggccctggtgcatgagagagatgaagcagcctatggggagctcagggccatggtgctggacctgagggccttctatgctgagctttatcatattatcagcagcaacctagagaaaattatcaacccaaaaggtgaaga

SEQ ID NO: 11080 - DNA, 519 bp, Canis familiaris
  misc_feature (1)..(519): n = a or c or g or t
acaatttgagaaagacctattgtttccagattttgatgtgtgttggaaaatattgttgcaatggacatcttggtaatttactgtaacaagtagncaatagtttatcaaaaccaacttgtacagactaataaatcttttccacagtattcagttttctaacctcttgctattatacactgctttttttttttcactcatatgttatttaatttacattgatacctgctatattaagcccccaaataagttatttgtccttttagncaggttacccttatactcctcagtaagatgtctgatactaatttctgtacagttgcaaatgatgcaataacttgtgatagtggattgacttcaagttggggttctttctgaaatgtacatcttcacgtaagacaaccttacattctacttggttcacacctgtgaaactacattacatgtgattaaaggttttatacattatatatgtatttactaaatataaacatttactcnnnnnntgttggagaaaagtag

SEQ ID NO: 11081 - DNA, 536 bp, Canis familiaris
  misc_feature (1)..(536): n = a or c or g or t
tatgacnnnaacagagacttgttaaatnnatacaaaattcgctgtaacaaccacacagaactcttgnnaaacctaaaagcagtaaatcaggccattcaaagagcaggtcgtttgcgggttggaaaaccaaagaaccaagtgatcactgcttgtcgggatgcgattcgaagcaacaacatcaacacgctgttcagaatcatgcgcgtgggaacagcttcttcttaggaaagattaggtaatggagttcctagaaagggtttttccctaaaaatcgagtctagtttgcttggatcacatcctggtgaacccaggtgctaaaaatggcaagagccttggtgagtgatacgaatgcaaggcaaccactgcatctgaaaagtgtatctttctatttttagaatcagttgcactgttaccagataataccaggtttgtgtagaggagggggatatctttgaaatgtaagggcttcaaagtccacatttttttctgtatgtatgtaaagttggtgtatagatgtatagatacatcttcttcct

SEQ ID NO: 11082 - DNA, 583 bp, Canis familiaris
  misc_feature (1)..(583): n = a or c or g or t
cgatgacntgcagcngtnntcatnntcagaagacacagagagggaatgagccagctcntggnnncggtcacnngtcctccaccccacaggacactgacaagtgtctgtgnanntgaagagatggcccactcctggactcatgtggggaatccgcacttgctcagctgcaccgcatggaaaatttcaggtccacagcgtcctgactcgtgttcctggggcccgtgctcagacgcccacccctcaacagacacagtgtacttttctttagggaaatccatgcgctgtggcaaaggctactcttccctgtggaatgtcaagttgttcttctggagatacgttacctatgaaatggagggaggtttgagtgagcacttgtcacttcaatggaaataaaatctaagatgttgagctctctttggttttcacatgtctgcatttggggattcggcatggggtacccactgtgtgctctgcaaatggataccatacttttcctgagatgagtttttcttgactctgtggtggtagtttgtgggaattgcgatgggcaatatttcacccatgtagttcatttttgtccttg

SEQ ID NO: 11083 - DNA, 420 bp, Canis familiaris
  misc_feature (1)..(420): n = a or c or g or t
gaacgtcgggtccaggaatacttcgagtgnnnagcacacgtggtgaaggggctccagggaacaaacccgccgctggaggaggctctaaagcagctgtttaaggagcggggactgacactctgagcagggctgggagccatcgggggccgggaccccaaccttgccctggccagaaaggactcctattctggcctttcggggcctctccatctcccaccctgattggttccagcccannnnnnnnaggcgaaaggacacctgtctcttctcactctgaatgtgttctgcctactaagctgagccctggattgtggaaatcagatgcagcccgtccattcctcatgcacccactgccctttctccagacctctggtctctttgctcttctgcnnnngccaactccggccnnnnngngacttg

SEQ ID NO: 11084 - DNA, 563 bp, Canis familiaris
  misc_feature (1)..(563): n = a or c or g or t
aaatatctggattctatgggacaaaagggccacaggatctgtgagattctcctncagtattnacaggatgaaagtaagaccaaaagaaatattgatctgaatcttttagagtggacccactacagcatgaagccacatgagattcctcaacagttgaatgggagtgattgtggaatgtttacttgtaaatatgcagattatatctctagggacaaacctatcacatttactcagcaccagatgcctcttttccggaagaagatggtgtgggagatccttcatcagcagttgctgtgaggaggccccgcccagtccctcgagctgctggtggtcctgtcacggaggacggatgtttccatatacctcatgcatcgtgggttcaaaagtccctgcatcagctctggtctcgcaggcactgagccgcagctcgcgccccggcgctcctgccccggccccacgtggtgtggggcttctgcgcggccgtgcgcgagcctgtgcctgctcgcagcctggatcgttcaacccacacaagaacaaacgctaannnnnnacttttttttttt

SEQ ID NO: 11085 - DNA, 634 bp, Canis familiaris
  misc_feature (1)..(634): n = a or c or g or t
tacccgaatccntatagcaaacatgnnntnacnnnagacatagtgcaccnnnnggtgacccctgaccagaaactcctgtccnnnnnnctcntgaccaagaccaacaggatgcctcgctgnncnnagcgactctttcctgccaatgttgctcactcggtgtacatcctggaggattctattgtggacccacagaaccagaccatgaccaccttcacctggaacatcaaccacgcccggctgatggtggtggaggaacgatgtgtttactgtgtgaactctgataacagtggctggaccgaaatccgccgggaagcctgggtctcctctagcttatttggtgtctccagagctgtccaggaatttggtcttgcccggttcaaaagcaacgtgaccaagacaatgaagggctttgaatacatcttggccaagctgcaaggtgaggccccttccaaaacccttgttgagacagccaaggaagccaaggagaaggcaaaggagacggcactggcagctacagagaaggccaaggaccttgccagcaaggccgccaccaagcagcagcagcagcagcagcactttgtgtagctagcccaggccctggtgcggtaggacacctgaccacccggcccaattc

SEQ ID NO: 11086 - DNA, 348 bp, Canis familiaris
  misc_feature (1)..(348): n = a or c or g or t
ttggctacccacagggcatccgcctgggcgtgcacccagaccccagcccggatcacgacttccgcagcttcctcgaggtgaggcctgatgagcacagtggggcacaactgtgcacggtggccggcagccgggtggcacctgtgccccagctgcccttcgaggtgatggtgcaagagctgtacccttcagcgcggccgtacaggatgagagcgccccagggctttcactccgtcagcatgagggacgtgccccagannnggcacttgggtgacaacttctggactgacactctggccatgaacctgcgcgagacatttgatgaagccttcctggcagctctgcnagccc

SEQ ID NO: 11087 - DNA, 514 bp, Canis familiaris
gtgtttgcagcagcaaaccgcgccccagacctgttccacgcggcgggcgcggggtctccgacccggacaccagctctttctttccgtctcgttggcgaagggggtggggatgcagttattttacttagcaccttgtgaagtgtttctgtgttttgtgatgctgtaatttattaatgtttgtagctttttatatttgtacatttcttatgagctttgtttatacgcctgtccccgggcgccgtgtccgtgaggccggccccgaggctggcggacgagctcgcagggcgcccacggcgcccaccgtgccgtcccggcgtctgcgaggctcctttcccgtcctcgttgaacatttatataatctaacccggccatcaagctgttctctctctctctctcttttattttttaaagtttattattattatttggcaacatgtacatttctaacaaagtttaccgtggctattaaagtgttttatttcccaattcatattactcttgtatcgagtccatg

SEQ ID NO: 11088 - DNA, 640 bp, Canis familiaris
  misc_feature (1)..(640): n = a or c or g or t
ctggaattgatgatggtgncaacccaannnatcccgacgtnatttatgaagattacgggacngcagcaaatgacattggggacaccacaaacagaagtaacgaaatcccttctacagatgttgctgacaaaagcggtcgggaacatctttcggtctatgctgtggtggtaattgcatctgtggtgggattttgtctgctggtgatgctgtttctgctgaagttggcaagacactccaagtttggcatgaaaggttttgttttgtttcataagatcccactggatgggtagctgaaataaagaaaaagacagagaaaggggctgtggtgcttgttggttgatgctgccttgtaagctggactcttgggacgggcattggcttctcccaggaggtgccgcttagttggggttttctggcagatgtgggtggtatttgcaggaggtcctgcatgaagcctgcggctgttgtgagctgtgtttggggcgcactgctgctgcagaggcagctcgcaggcagctaagaaaatgctcaagaaaacattttaaattcatgcttccctcttgttcttacaattgctcaaatacaaaattgaaatgggattccattggattatgcttctcttcttaaaggagtgctcctt

SEQ ID NO: 11089 - DNA, 514 bp, Canis familiaris
  misc_feature (1)..(514): n = a or c or g or t
cactgggtnnataatttgctctnnnngnnaanctgtaannnnnntttgtttccggtaggaatgcctcttannaactacctgaactttgaaagctcacctgcaggacctgttcctgaaatgagaccacggttcaactgaactgatctgttctcaggaccaagaccagttcatgagatgaggagcagactcctcccctagggtccccagcaaaacggctaaactccagcaatgagggaacgctgctcatctgtaatattttgatgagaaaaagtttcaccacaaggagaggatattaattcataaacacagcacaaggacttttcagtgaaaatctattccggttgtgggacagatttgtcaggatgatgcccagtcgtggcaaagtaggtcagagggctctgttttgcggggaacacggtaactaaaccaagtatcagccttaagtgacacagcacccaggctcggggaaatattagtaagtgctttagtcccgaaattcttggcttaaatctat

SEQ ID NO: 11090 - DNA, 549 bp, Canis familiaris
  misc_feature (1)..(549): n = a or c or g or t
cccatccccacccccatttngaacaatgaaatttaaattatnnngaaatttacantagttttgacctattatggcattnanntagaggaaacatgcgaacttataatgtgaaataattaaatgtcttcttttgtttgaaagttctttaaattccttatgagacacaggaatggatagaaaacacttcagattctacagaaataaataagtatagacagatagatacagatatgaaaataacattataggtgattctgctttctaggtaacttaaattctgatacgagcataagacagtttttgagagatctttgacaaatttggtatttctcaaatttctgtgaaactcatacgtactgattgaaaaggtatagaatttagtcaaaaaagtcaaagtgagaacctgaggctatttttccctctgattttttttgactctgattttgtttgactctgatttttttctaaattcttttccccagccatgttttttccaatgccatcattttagtttcaattactattatannnatgcttttagtttatcac

SEQ ID NO: 11091 - DNA, 481 bp, Canis familiaris
  misc_feature (1)..(481): n = a or c or g or t
gaggtgatggtncctggtatcagtatccaantgttgataagnnnnngattgattannctccaaaagcanctcctgataactaatcttttatttcnnnannannnnntgtattctctttaggggaaaactcaannnatatatnnngtatntttgcnnnnatgatgaataaaagatcttccattgttctatttctccacattggttcagattaagacttctgtgtgggatttcaattttttttttttttttttgctttattgaggcataattgacagaattgtaagatttgaagtgtacattgtgatgatttgatatatattgtgaaaggcagaataagacttttgtcttttaagaaggtttgttatataataaaaccttgggcaaataggaatttatgaactcctaagggtgtgactttganngttttgtnnnntnnnnnnnaagtnnnngaagtctnnntatgnnnnnnatcaagaaatgt

SEQ ID NO: 11092 - DNA, 332 bp, Canis familiaris
  misc_feature (1)..(332): n = a or c or g or t
ggcctcgggggtccggccagcgcggggggccccnnnnnctgccccagatgcctccaggaacccananntggnnncccggccccccgcccagcatccatgtccnnnggaggccnngcttggttttccnnncgcctttgccctccgtnnngtnttgctttttttccttgcccccccccccccccgccccagaataatttcctttgtgtaaacagagctcttctagtcaggaagcaataccgtttcaggtctgaagaagaaagggacatcaatctggccgagggcaaattcagttttactgtataaactcggctgtgcagctcccctccggctgc

SEQ ID NO: 11093 - DNA, 638 bp, Canis familiaris
  misc_feature (1)..(638): n = a or c or g or t
acactggctagtaggtgtngngcagtactggctcccntnntgatgaccntaatggcatatctttccattttgccctggatcatctatggagtctttcccatcatggctggtcttgctgtcctcctccaacctgaaaccagggaaatgcctctgcttgacaccatccacgatgtaaaaaataacaaagaattctcaagaaaagtaaaagaaataaattcctctgtaaaaatgacaaaagtttaagatattttcaggaactgactggtgaggaaaaagaaaactatgaaagaaaaataaaatacagaaatttccttttatatctataaattagtaagaaaatattattggaaaattaatctcatttacatttattcattaatttgcagtttaagaaataatttttgggaatacataattctatgaacaatctaatatctttgggaaagtttcaaatttatgggtaaattattaatatacaaaataattcagaaataaagtaaaatcatggaattaatatgtagctggctgggagagagaaaaggggttacgtaaatgtggatattaaggagggaacttgtgatgagcactggctgttgtatgtaagtgttgaatcactatattgtatatctgaaattaat

SEQ ID NO: 11094 - DNA, 479 bp, Canis familiaris
  misc_feature (1)..(479): n = a or c or g or t
gaagtttgaacattaatgttgagaacagtggggagcgtgtgcatagtgacatgaacagacngncttcagtcactgccactgaccggtagagagggcatctagaaaggagactgggggtgggccatataccatttcaaacagagaagtgaaaatgaggatgggggggaattgacagctgagagctacgtagtaattaaaatttaaaaactggaaattgattagctatcaggaagaggcaggttcctgaatgatgctggtttaattacctgagttgatggaggttctgcttatatggtgagacaggaagagaaacattgtgccagaagaatggagttcatcccttaagaatggctaagaacataggcttggaagtcacacggggtttgtatccagctttgccgtttccgtcaagactggtgggctaatatttattgagtacatagtatgctttatgacttactttnnnnnaatgacggtgt

SEQ ID NO: 11095 - DNA, 462 bp, Canis familiaris
  misc_feature (1)..(462): n = a or c or g or t
tngnancttctgtcctggacagcatcaaggagggcttctcattccagcccnnnctacgctcccccaggcgtctcaacagtagtccccggaccccggtcagccccctgaagttctcaccctttgagggattccggcccagctctggcccaccggagcccatggagccccctctacctcctctcctgccgccgccaccaccaccaccatcgagcactgcccctctccccatccgacccccctcggggaccaagaagtctaagaggggccgtgggcgccctgggcgctaggacgatgggtagctgtgagggcaagcagaccctagggcagttccagaccctggaggtgtgtctaggggtacgggagtgagtgtgtgtgagagcatgtctccgttgggggtggctgtgcccctgaaccgtgcccatgaagggctataggctgtggctgtcagtggagtggcctcgc

SEQ ID NO: 11096 - DNA, 699 bp, Canis familiaris
  misc_feature (1)..(699): n = a or c or g or t
ttcctatgtatnnaattgccaccaaaaaagatgttgatgtccaaattgatcannaatcctacctgcctgaggaaatagctggtggagtggagatctataatggggatcgtaaaataaaggtttccaatactctagaaagccggctggacctcatagcccagcagatgatgccagaagtacggnnagnnttatttggtgcaaatgccaacannaagtttttggactaaacctttgnnagcggtagagttcatccactgctctcctgctgtggcatggaagtttctgacatttgaagaaacgagatatctgtgtggcttcctcttccctgttctcatagtctgtatttgtcagtggatactctgtgtaactaatgcccttatcctaattgttgacaatagagaaagtttcacttcatataatcaggaaagttcctttttagcttatctaaaagtagcacaactttcatcggcttgtgtagtgtgaaggtgagggtatcagatggtggtcacaggggcttcaccaagtctccgctcttcctccagtcttccannncttgagcctagaggggatgtgtacggtgatctctgacatgaagtctttgctcttaggcttaaagtgcatgggggccgtgcattcctcccagcagtagtcgcttcaccactaacctgtttgggcctagaagtgttcctcatctgtaaa

SEQ ID NO: 11097 - DNA, 522 bp, Canis familiaris
  misc_feature (1)..(522): n = a or c or g or t
cacnnggtntaaacacttggnncttgatatttcannnnnnaggcttttttcccccctcctcaaacagcagttcaaatgcttcannttcagaaggtgcaccactagtannaggttatggatgtactcctcattcattcccaaagttccagcacccttctcatgaacttttgaaggaaaatggctttacccaacaagtgtaccacaagtatcgtcgaagatgcctaagtggtaagatgcttgtcctttgtgtagctatgtttaaaactaaaatataatatttaaaaatgtgatatttaacatcaggctaagatattcttttattttgttataattaccttaattacttatgtatttcatgtatttttgtagcttagctacatgaagaaagtttagcatattcttcttaccattgacaaatgcttaaatttgagcaatgagtcagaaaatggattcatacttatcccttacttagaagaaacccagatacattttggagattaatatgttttagcttttcttatt

SEQ ID NO: 11098 - DNA, 519 bp, Canis familiaris
  misc_feature (1)..(519): n = a or c or g or t
ggagtnngagtnnngctgannnctgaatctgagtccaggaannagcatatgaaccaggtggnnactcagagcacaggatgaggatgggtcaacactgggtttttttttgttttgtcttgtttttcgaccaataaaggctgcagacagcaagtacaattttgttgggccttgaaaggtttaaatacagaggtggggagggctagcaggaggcagatgtagacacatcggcatgagaatggatgtatcagaggaatcatataatcaacagctggactggagagctgggaagaagggcaatctgggacagaagtggggtgccagctggcagctagccttgggtgtcaggatcatgccctacattaggacaaagtcctatttcctgggtcctcaagccaataggatcacatgggcctgagctgcagtggtctcattgctcggcataagatgagtctgctgaggaatagccaacactnnnnnnnaggagaaggagggnnnnngcataatgttacaacatcattt

SEQ ID NO: 11099 - DNA, 671 bp, Canis familiaris
  misc_feature (1)..(671): n = a or c or g or t
agnntgaaggatgagatgnnnnncctcaggaaattgctcgactcnnnnnnatcccnagnnnnnntctgcnnnaatgacgtnnannnagggaacatcttgttgctctcagagccagaaaacaccgacagactcatgctggntgacttcgagtacagtagntacaactacaggggctttgacattgggaaccatttctgtgagtgggtttatgattatactcacgaggagtggcctttctacaaagcgcagcccgcagactaccccacccgggggcagcagctccattttattcgccattacctggcagaaggcaagaaaggtgacaccatctcccaggaggagcagagaaaactggaagaagatttgctggtagaggctaatcgatacgctctggcatcccatttcttttggggtctctggtctatcctccaggcatctatgtccaccatagaatttggttacttggagtatgcccagtctcggttccagttctacttccagcagaaaggacagctgagcagcttccacccctcatcctgactctccggcccccaactcctcagatggctcctggagcctccagggcaggaccttggagggaggggcgcagagcagggcaccntgcggactgggctgagccctggagtgagcctggggttgagggtcgtggt

SEQ ID NO: 11100 - DNA, 542 bp, Canis familiaris
  misc_feature (1)..(542): n = a or c or g or t
gacaagtgtatnnnaatctggagtgaagacggacatcatgatatcttnacaggtgtnatnnnnnnnagatcgaggagatagatgaagaaaacggcactgctgcaatcacctttgctggctacggcaatgctgaagtgaccccactgttgaacctcaagcctgtagaagaaggaaggaaggcaaaggaggacagtggcaacaaacccatgtcaaaaaaagaaatgattgcccagcagcgtgaatataaaaagaagaaagctttgaaaaaagcacagagaataaaagaacttgagcaggaaagagaggaccaaaaggttaaatggcaacagttcaacaacagagcctattctaaaaacaaaaaaggccaggtaaagaggagtatttttgcttcacctgagagtgtaaccggcaaagttggagtaggaacttgtggaattgctgataaacctatgacacaatatcaagatacctctaaatacaatgtcagnnatttgatgcctcaannatcagaaaaactgttggatttcatctctgcagggctt

SEQ ID NO: 11101 - DNA, 698 bp, Canis familiaris
  misc_feature (1)..(698): n = a or c or g or t
cnacgnggnacacagtgctgtctgtanngannacagacaatgtgtcacacacagtatgaaggctttccaaacggactttgatgctgccgtgacacctgcattttaaagctttgcatcagtggattctgaaagcataatcgctattatatagaggcactgagaggtattttgaatcccaattcttaaactattgctttagtccacagtatgccttctctacacttttggatattaaggtccagaggnnnnatgcaccaaaagtcccagaacaggtcagtgcaaagccagaaatgaagcctaggaccctgactggtccccctgcccccacccccagctcctctgcacttattcaagtgtttattaagcacctgccttgtggtgggctctatgccaggcaccaggagacaatgatgacaacccagtgctctcctcgcaggggctgacgtctgggaggtgagtaggcatgaggcaaggagaggacacagtgaacagagatttggtcagactccctaaannnnccaatgaaggactggaatcaggaaatgatgtgattgggtgcctgggttcagtggctgcctttggctcaggtcattatcctggagtcccaggattgagccccacatcaagccccccatctacccctgcattgggctccctgctcaatggggagccnnnnnnnccctctgcctcttgtcctg

SEQ ID NO: 11102 - DNA, 615 bp, Canis familiaris
  misc_feature (1)..(615): n = a or c or g or t
actgtganctgngaatgcaaagtgtgatagcatttgctacagtnntaactcaaaaccaaacaattaagggaataaanntaaaccgacctatactgtatggtgaacagcaataaaataactcgtgatggaatggtgtatttggctgatgtactgaaaaccaatactaccctggaagtactagatctttcttttaacagaatagaaaatgcaggagcaaagtatctcagtgaaactcttgcttcacacaacaggagtcttaaagcgctgtcagtagtcagcaacaacatagagggagaaggccttgttgcactttcgcagtcaatgaaaataaaccccaccctctcaaatgtctacatttggggaaacaaatttgatgaggctacatgtgtggcatattcagagttaatgcaaatgggccgtctaaaaccagacaatacagacgtggaggcatttgtggtggatggacatgtgtatcttgcagaagtctcgaatggccttaaaaagcattattactggaggccaacttatggagcagcttgcaggcactcagctaatgcaggttttactcttgtaccagtaggtggacatctatgaaaaaactaaaataatttttac

SEQ ID NO: 11103 - DNA, 574 bp, Canis familiaris
  misc_feature (1)..(574): n = a or c or g or t
caggcacccnnntggtgctgtgccttttnnantgttaaggcgtgagaactctatttgtagacagtagagtacnnnacntctcaccccacccctcatcacagtggacccacggagtatccccccatacagctgcttcccttttctttccttcttccttcattcttttttccctctttttaaaagttgtaaaatacaacagaaaaccatcttgaccattattaagtgtccggtggcattaaatacattcacattgttgtcccaccatccattcccagaacctttttatcttcccaaactctatagccattcaacatgcaacactaaccctttcccctgagcccctgacaaccaccgtcgtactttctgtgaatttggctatgcacctaatgtaagtgggatcctacagtagttctccttttgtgtcttgtatgttacctacctcaatgccttcaaggtttttccttgttgtaacatgtcagaattaactttctgaataataggctgaataatatttcattcctggtatgcaccacattttatttattcatttggggctcagttgtgaataacatca

SEQ ID NO: 11104 - DNA, 538 bp, Canis familiaris
  misc_feature (1)..(538): n = a or c or g or t
ggtgtgattttttttnnnnncttccaatttctttnntatatttcttcaaagcagataagtcgaatcncntctgtgtgaatgnggnntttttttccttttaaaatttaagaaaccgtttgccaaatcacatttttttttttttttggctttttattttaccattgtctgaggaattactagccgaagaagagttgactgtccatgtgctttagttttcatttcttcctgcgtggcaccaggaacggttaccaaacaccctaccagggatgacctttcagtgcaacctctgagctgccacccagtccctagagcagaggcatctctgtgggggactgggtgtggccgtgccttctgcattcaagccaaggactgcgggcgaggagcggctcccaggtcccccatacccagggagccgggttccaaggctcagccttggggcgagagcagccacccagctgggttagagagccccacctcttcagaaccaatactgccagaggagaggtgacctagggcacaggtggatactttagggtga

SEQ ID NO: 11105 - DNA, 482 bp, Canis familiaris
  misc_feature (1)..(482): n = a or c or g or t
acccccgacaccttctcaccggcccacacctcccanctgatctctcacnngagacancgatanngcagtggcgtcacacgaagatgcagtgacatcacacagacnaggcgatggcatcacacaagaacctggcagtggtgccacacagacgcagggaggatgtcacccacagatgcagtgccgacgtcacacacacgcacatgcacacctccgcccagcccttgcccgatgtcacaccctcccacgcacgcgggcccaggcgaccgcagcaccatacccatctgccacctctgtgccctcgccacaccgccctccagttttctcctcttctgactcctcacccccagggtgccaggcctagggaagcaggaacgggagacattagcctccgtcccctcagggacagtctcctggctcccctgccaggccgcacttgagcccagggccgatgtcacccacaggccccatcagagcccctccct

SEQ ID NO: 11106 - DNA, 625 bp, Canis familiaris
  misc_feature (1)..(625): n = a or c or g or t
gccnntnctgtaaaggtggttatcatnngcatttattttnnnnaggtaacacacaataatnnaattgggggnnatcttcannnngatcaccaagatgtcctcatcatggtccctttagctctcaaaagcaatgaaaccctcccgttctcatttttattgctatggctctgctgctgaacagtactatcttcgcaaattccatgcaacagattcagcaataactttttggattgaatttagcaactactgtaattggatgctgacatggacaaaatatattgatttgggcctcatccccaaatgtgattgccaccagctctttatattgctgctgtggtattttaaaccagaagcttctttaaattatgttgcaaactgatctttgtttttatgttatgttttgtttcgatttccaagtgatgagttcgaaacacacagctttaaatgatttttttattgtgggattttgggtacagttaagaaataaaagggaatcattgtgtttaaacataaggtagtttgtgaatgtattttttaaaatctagagtcattgaaacaaaaactcataaaaacaatattaatgcagtcttgtttacagtatgtacagtgacataacatagaacat

SEQ ID NO: 11107 - DNA, 506 bp, Canis familiaris
  misc_feature (1)..(506): n = a or c or g or t
gacagagcagtagtgtccacatctgaataactgggcgtnntaaaagagaagaagaaaagtagaaaaggaaatacctgaagaaatgagaaactggccagaattaaagatgaaaaaactcatggatgaaaaacgtacagaaaacatacaaacagaaacactagactgaaagacatttaagaccatctaagaaaaagcaaaacttctgacagctcctaaacagagacggtagatcaattacagagagggatcagtcgggcaccaggtttcttaatagtatttaggtgagagacaaagacgttcccaaaatgctgaaggaaaagaactttgaactcaaaattcctatcaagacaaattcatttaagtataaggatgcaataaaaaatagtctctgggggatcccctggtggctcagcagtttagcacctgccctcggcccagggcgtgactccggggtcccgggatctagtcccacatcgggctccctgcatggggtctgcttctccctc

SEQ ID NO: 11108 - DNA, 272 bp, Canis familiaris
  misc_feature (1)..(272): n = a or c or g or t
gccatcactcaagatgcacgctgatcancctcccctcaaaaagnnaaagacttatttatggctgacacacgtggnnagcccccagcgannnnnnnacgccctctgcgtttgtggtggtggtggtggtggtggtggtggtgcatnnnnnatcagcttttaatggggcnnctgtgtannnatacttgcttcctctnnnnngaaaagaactgaggccnacctcttctcattttgggttgtgccctatgttgtgttgtaatgaggctattttcact

SEQ ID NO: 11109 - DNA, 523 bp, Canis familiaris
  misc_feature (1)..(523): n = a or c or g or t
cgtgctnnagctgcatgactggatgtgcacccatttcgaaaggcaccccctgtttgagcgtgtgcccttggaggagctgagtgaagaccccattgtggaacanntgggcacctcaactgaggaaggaaagaaagtcttacgcaacggaggcaagaatttcccagccatctttcgaagaatacaggatcccaccctccaggcaatgacccccagtcccacccctcttggccactgccggcctgccttgccttagcgtgacccctggaccttcccagctgagctgccagggccaagaggcgacagtctttcaaagaagttggggaactgcccagggcagaagcctgggattcacaactaccccgacctctcaccttcttgcccctctaccaccaacagaaagcagaagaagctacgtaggagggtcagcagaccttggaccaaaagggatgtttggaaggatgtggggtcttgctctcccttagcacccccttctccttctgggatctctcctcctcagctggaa
